United States Patent Application Publication US 2026/0191916 A1 - sequence listing, part 102

SEQ ID NO: 644 - DNA, 1983473 bp, Oliverpabstia intestinalis
  source 1..1983473: mol_type = genomic DNA
gattaatcttgtctgcatgaaagtaatctctgttttctcactcattatgaatcctcctcaatttcttggtcaataaaatttttgcttagaactctttttcacgggctctccattctcattaatctctccttcaagccatgccataataccaaggttacaaaacggacaagttattgcatccttatagacttctttctcgcagcgagggcatgtaacatattcttcattttttatatcttgcatatgattattctcctttatcagttccgattttcttgattctgcaaacttgaggttcgtaattacattccatacatgttcgcattctttacaattattttatcacctttttctaattgttccttggaaattcctcgtaacccaaggccaacatgctctgttttatatccgcaatcatttgattttcgttcttttgtatgtgcatcaacagtagtaattgtagtttttaagacatcgccatttgctacataaatactcacatcttcccctactctgcacattccagttaatatatatcctgtggctacagttcctactccaataattgtaaacacatcatcaatgataagttcaaaattctcttttaagcatgatttaacatctaatttattcatatattctttttctcgttcttttttgctttttccaaatattcccatagtgtttctcctttacatatttcaatttttcgctctctgtgacttccagataaacgggaagctaattgatactatcataaaatctttgcaacatgattgccaactcttccggagcttctatgtttgcttcatgacctgttttcataagttcatagaagtcggaattgttcaaataatggcaaagttcttttgaagtttttttgtttgctttgtccttctctccacaaacaattaataccggacaagacaccttataaagtgagtcactgaaatctaattcagccatcgtaccacataggctaataacatctgcttttttgaagcccattttattgaatgccgaatttggcataagatgaaacaacatgttctgaactttcaataatttttttggcattttatattgtgctgcaattaatacgagtgcctttactttatctggatggtctatcgcataattaagtgtcaaaacagctcctagagaaagcccacataagacaatttcttcgttctccttgtcgcattctgatgagaatgataaatataattccttatatgtaatagatttcccttctaacatctctgataaactcaaactgcaactgcttttcgatactttcgtttcttttattactctattccaactgtctggtttttgccctagtccatgcaaatataaatacttcatatatagtcacccttcaaatttatatttcacgctttctatcactttatatgtctgtatctgaaatattcagtcacaaactctttattggggataggcacctgtgccgcaaggggaaactccccttgtccgaaatctctgatttcgctgtatttcccggattgagatttctcaaaaccgggaatggcaccgcaggtcgcacgatacaggcagatggaattgcctgtatagaagtgcgctcttagctttgctaagagaattatgccgtatccggcgtgttatcttttttcgatttcttctactttcttctgataaagtttcatcaattctgcaacacaggctgcttcgcttttatacgcttcactgccttttgtaaatccatatgcctgcatgactgccatatcattttgctgatgtgcctttctcaattctggtggcatcgttaattcatcatacagcgttgccagactactatttggatataatgcccttgcatcaagaattgcctgtgcagtctgttcgattttttgccgctgctgagtggtcggatctggccatgggaaattattgtatacaacatcttttgaataactatagtcactctttaatcgcatacacgttactcgcatccaagccatatgaatatttgaaataataattccaaaatcatacagtgaagcatccgggattacctgaaccctatcagttacaattgttccagctttaataaatcccattgggacataacgtcttgcctgtgaagatactctcggcacaatgataaaatctttatcaactggttgcgttctctgtgcaaaaagtgttggtgtagctgcaaattttcttattccagccgcaacgctgctttctctcgcctctttacacttctttattctttccataatcattgggcactttttcaattcttctggatctgctccaacaagccataagcaccatcttttatttcctttgatatattctgatgctcctaaaagaggatggatatatttctttgcattcggatctcttttaataaattcatccaagtcctcattttcaataattagatttccgccgtctgctggtttattgccatatatcatctttggaatgtcgcacaaaggtttattcctgctacgtactaatatatcatctccatccatcagataacaattgatattttcagccactgtagttcttccattatcgtataaatatttagtcgaacgtgagaatttcgcaaatccaatgattacgcaatgtacatgagcttttacactggcttcactatcccatacaaacgttctatatgcaaagttaataatatcatcctgcataaagtcccaaaatctcgataccgtttcaccttgaacaattgaatttgttgatacaaaagcgacttctatttttgttccccgaatataatccgacgcttttttataccaagcacaaacaaaatcaagattctttacacctggaaaaatattttgcatatcttgtttttgctcagctgtcataaaagtaaatccatgaaacggaggatttcccataatatacgaaacctgatattttggtacaacactctcccagtcaatctgtaaagaattaccttctacaataaacgcattggtcgtcaacggcaggaaatccagattcatgtgaacgatgtcttccgtctctttcatcatctgggattctgcaatccataacgctgtctttgcaaccgtgacagcaaaatcattgatttctattccataaaactgatcaatagaaacgtggattggcgaagattcgtcaaagccaaacgtaatctgtcctctctgcaattcttttatgacttcattctccaatcgccggatactgatatatgtctctgtaaggaagtttccacttcccgatgccggatcaagccaccgaagatttgatagctttgtctggaagtctctcagcttcttatcttttgttctctgaaccgttatctgctgaatttctttcagttcatttttcagttcatccagaaacagtggatctataactttatgaatgttttcaatgctggtgtagtgcataccaccggatcgtcttgtttcaggattcagtgtactctcaaataccgcaccaaatatagtcgggctgatttctgaccagttaaaatctgctgatgctttttccagtaaaagattcctgatttcatctgtaaactgcggaatttcaatatcttcattcgcaaataaaccaccgttcacatatggaaactgtgccagagattcttccatatatggatctctgtcttctggttttgtatcaagcacctggaacagctcaatcacggcttttctcatgtgccttgtatcaaactcttccagataatcatggaacataccatgctgtccgaagatacccgcatcctctgcatacaggcagaataccattctgacacaaaggatattcagacttttcattgcacgctctgttgtcgggtcaacatattgttttgccagtgcatcatacaacaatcctacaatatcaccagcagcaatggaaacttccatttctctctgaagatttgtattgccttcgtccacaaggaactgtaaccgataatattctttttccagatcctccaattggataatctccggatcaccacccggcttttccatatcgtaaatatagaatgactgaaaattactggttacaatccatcttggtctttttgaatatggcaattcagaagaatatctttttgcctgttcaaatggtgtcagcatggaaccatcggactgccggatagcagccgtcaggctcttgttgatacttttctgttcaatcatgacatgggttttctcaatatacccgtcaataaaactggtgtggtcaaggtgtacctgatcttcaaaagaaatgaactgtgagatttccgttacaccaaatactgttgtcagaagctccacccagaaaatctggctgtcacctttttcatatccacggtctttccagtttttcgcaaatgctttcgccgctgctctttgctgtgtatctgtcattgcagcaacctcctgttattcatcatctgtaaattccatcatctcatccacggtgcagtccagcttcttgcagattttctcaatcgtctccattgatacatactggttttttcccatccgggcaagaatgtttccgctgattccggtgagatactgcatctctatccgcttcatatttttatctatgagcattttccataatctgttataacttacgcccataagctacctccataatttcatctaaacatattttgattatatcatgatccaattcgccgttcgtcaatcatgcaaacatgttgactctcttgcgctcattatatcacgatttcgttagattgaatacctttagtttttgataagttccataaacggaaaagaggatgccacagcaaatggcatcctctccaatcatttattccggtttagtcaaatggaacttcaccttccggtgcttccataaatccgtccttatctgttttctgtgtctctgacgaatctgcaccggcaccgttatccttgttctgagcaaattcatgttcttccacaatcacatctgtggtgtaaactgtttttccatccttgtccttatagtttccagtgctgatacgaccgctgatcacaattctcgttcccttgtgaagatatttctgtgcaaactctgcactctttccaaatgtgacacaagaaataaaatccgtttcctgttcaccgtcacgtttatatcttctgtttaccgccagtgtgtatctcgccaataccatgtcattgtcttttccggcatatttgatctccggattctttgtcagtcttcccattaaaatcactttattcataatcgctactgtcctttccgcagctacgctgccattgcatattcttcatcatctggttcattatccggcataaacattgcacatgcgtccggtggattagtatcatccggcgaaaacattttccgaatcatttcatatatgctcggataccgatatgcgatttcttctcttgcgaggaatctgcataccttgtaaagattctttttcatttctgcatccgttgcaagcatagctgccagatggattctctcctttgtacagttcagattcgggcatccaaaccagtggattatctgcatttctttcattttcagttctgtcataaactgctcctttccgggcatttcgccctgtaaacattgttatcagtttcattcgtccggcggtctggtgtgcgtttccctttcatctgcagtcgtctcagactgcctctgcctgcatcagcaggtcactgaccataaggctttggtcagccgcccatcatcgggagtgtcattatgattccgctcactctctgaaaaagaaaggtcatggcagaactcctggtagacttccagggtgcacttatcggttgtcaaggttcagcgaaggaacattccaaaacgtcctctgattactaaagtcaaatgacttggcatgatgcaaaaaattcgtgatatttttttgcatttttatcattttttcttttacttttgttagtcccttcacttactctgtattgggagagataaaagcggacatgattttgaaaaattatgaaaaaattttgttcctctacctataaagcttttgaaaatatatttaccaacccccttttgcaagttttttcgcataaatgaaatattccctcactaattgcaagtttcagagtatctttggacggtactttcgcagaaaaatttatttttcttactaatcacacgtggggacttgaagaatgtcagatgattttttaaaaatcaaaaaagaagcaccgaccgttacagtcagtgcttgtaagatgaatatttaaattttactgtccttttcacacaccagcctttcataatccagaaatccccggatatacatttcttttgccacaatcccttccattgcatttttcgctgaaataatcctgtccaatgcctgccacatctcctgtccagcatctctgaggacgggttccagtatttctatgtaatgatgaatttctgcttccagagagaacatctccggatcagaatcaagaaatttttccagctcccgctgatattcttcataatagctttcaatcaattctcttctcatatctggaatcccccttatacataaatcagttcctgtttgatgatttcagaagcccggttgcggatattgttgcagtgatgcacccattccataggattctgtctcttcaattcctcggtaattccctccgcacttcgcatctgagcttcaatcaactcaaaacgttcctgtgcctgttcattcagatctgccagatagctgtccagtctggcggtcagaagaagatatgtataagttccagatttatgttctttcagatattccttccgaagcattccccagaagccaattggtctggtttcctccggatagtcaagattcggtaaataatagtctcccacttttgtgtattcgattttcatggtgtctcctttcgctttgcatgaagttgtcatgttatctgcgtaagatgtgctttttttcttaaaatcttttcacatagaagacattaagtgcttcatgccctgggacttggagcccgggttatccgagccgtagccctccagcagattgaccacaccccatacgccaaggccagcgccgagcgcgataacgagggtctgtaaagtgtcgattgcagacgagaaaaatgccatataagcctccatttctccgggattttcccggtaacaaaaaagccgcccttgcaggcggcaggttacaaacttcgggacactttgtctcgaagcgtttatgcaaaggcgtctggatcgtcgatgtcatcatagttgaggatgtcctcgtcctcttctgtgaacgcatcgtccggcacagtcacctcatacatcgtacacgcctcgttcagaccgggccgcctgcggcggttaatgagcctgtcgaggtcaaaagcgtttttctgtttatcggcctccgccgtataacggtagttcggatgccgtttcagatcatacttgggagagaagaacgggggcagaccccgaagctgcaaaatacatttatctcccggcatggttgcaagttcggctggggtcatcagttcccggcccagccgctgggtattttgactgtagctttccgactgaccacgggagcggctgtcagtctgcatactgattgtggcttttcccagccagttctcggatatttccttgatggtgctggcttcgcggccaccgaggaacaccacgctatccatgttgccgaagattgtctcggcgtgtttatcgtaaatggccttgcactgtgccaactgctgatacagcaggcaaagacttacctcgcgggagcggataaccgcgaccagcttttcgagctggggcacctgtcccgtgttggctgcctcgtcccacagcactcgtacatggtgcggcaggcggccaccgtgaacattgtccgcccgttcacacaggaggttgaacatctgcgaaaaagcaagcgccactaaaaagttgtaggtctgcgtggtatcggaaatgatgaagaataccgctgttttccgatctccgatgcggtcaagctccaattcgtcataggctatgacttcacgaagctgcgggatgtcaaagggagccagccgcgcaccgcaggaaattaaaatgctttttgccgtcttgccgctggccaatttgtactttttatactgtttgaccgcgaagcaatccggcttgcgcttttcaagcccggcaaacatatagtccaccgcgttcataaagtcctcgtcatcctccttgacctccatgccggaaatcatatccacaagggtattcatgttccgatcctcggcaggcccctcgaaaatgatgtaggcaatcagggcgcagtataaaagcgtttccgatttcgtccagaatggatcgccttccttgccttcgccctttgtgttggaaatcagggcatccacgaatttcagaatatcggcctcgttgcggatatacgccagcgggttatagtgcatggattttgaaaaatctatgctgttgaataccttgattttgtacccgcgtttttgcaggaaagctccgacctgtcccagcacaccgcctttgggatcgaccaccacataagaggaatgagcctgtaaaagctggggcgtgagccaaaagcgggttttgccggagccggacgagccgataatgcagcaattcaggtttcgggcatttgcggggattttcgggcgggtgttcatcgtgagaaactccgtcccggtcaaaatcacgttgttttcaaaccttggatcaacaaacggtttgatgtctttttccgttccccatgaagcgttttgtcaagtgcttttttgagttattgacgcaaattatcgtgaaagtgcgaaagtgcaaagtgcaaagggtctgcgttttgcactttcagcttgcgggttcgggcggctgcttcttcttgatgaagttgtaccattgaccgccgacacgccttgcgcctaaaatgccgcccatgtcgcgcttggcgttctgtaccgtcctctcggatattccggcttcggctgcggcctttacaatgtcctcgctggcaagctctttcccgtctgcaagcaggtcaagtatcagcctttcagcctgttcggttttggtggcgttgttgccgcccgcgccggacagcagctcgtcggcggtgatgtcgtattcgcctatccacgaaaagcctgtttccgggtcaaggcaaaaggctatgggcttgccctccggcgcaagggaagatttgtcatggacgataacgcgcacattcggttctcgcttcacgcgcccgatcagcaggacgctccttgctgcggcgcggaagtcgatagaacctaagccccggtatgcgctctgccctccggtagctttgttgagatgtccgataaggataacggcgcacccggtacgctcggcaacatcggcaaggcggcggaacatggggcgcacttcgttcgcccggttcatgtcggttttttcgcccatgtacgcctgtatggggtcaaggataatcagccgcgccccgttctgtatgattgctttctctatgcgctcgtcggacagggtaagctcccgttttgcttcatcaatcacaagcacccggtcaaggtctgcggcagcttctatcaagcggggcttgacggtatcgcccaaaccgtcctcggcggtctggtaaatcacttggaatggcggcaagggcttcattcccggcagcgttcccccggtggtgcaggcggcggcaaggcgcagcgcaaatgtggtctttccctcgccggggttgccctgtactatggttactttcccaaaggggatatacggtttccatagccattcgacggtctgtgtgtcaacctcgctcatgcggataatctcaacggtttcctcctgcggcggctctttcacgccgtaaatcgcttcccggatatacttcccgtctgtgatttctgcccggtgctgcaacacctcgttccagtccttgaaaagagggataagccgatggacggtgtagccctccggcacgagcttcacaaggcggctgcaagcgtcgtttccggcttcgtcgctgtcaaggcagagaaaaacggtcttgatgttcggacggtcagagagaaagcgcaacagggctttctcgcccacgccgcccaatgacaggtagctttgcttctgccaatcctttttgaacaggcagagaaacgataacaggtcaatcggggcttcaaagacaaacaatctttcgccctcgccccggtagcagaagttaaaggctttgtcgctgcctttcacatcaagccggaaactcccggctgtgccgcgctggtgggcgtagcgtggtactccgtcctcgtcccgtcctacgaatacggcgttatggtgggcggcttcctcgtaaatatccccggcagaaaagaaaaagcccgacacatcttcatcaatgcggcgggcggctgtgaggtagttcctcgctatgcggttgtcggtgctgcggggtggcagtcggaagtcggataggggcgcggggcttggtctgtccggcggcggggcggctcctttttcgcctgtcagcagttcaacggcttcggtgaagctcttgccgaaaaactccatgacaaaatcaatgggtgcaccgcccttactctggctgtgcctgtaccatttgtttccccggacggtcaggctgtcgtgccgcttccagcggtattcatttccggcacgggtaagttgctcgccctgtgattgcaggaaagaaacaaggtcggcttggttggcgcggtctatctgttcttgggtgtaatacataaaagttcaactcctttcagcggtctatatcatgccgtttggtgcggctctgcgtctgctccggttggtcggcgcggagtgcaatatccacgcatttgcggattttttgaagctcggcaacctcggcgcgggtctctttcagcgtgtcatattccgcttcacgctgtgccttgagggcggtatattctttctcccacgcggagatcggcagggttttcacgccctccggcaaatgggcatggagatagcggtttgccgcgtcccatagggtcagctcggcgcggcgggcttccgcaaacttctcctgttttcctttccagcggatttgccgatactcgtcctgtatgggcttgtaggtttgataatttctaccgtactccatgagtttttgcagttctttcatgcgctgctcggcgtttttcattccctcccggattgaataggctttatcactgacagaggaaagagaagcgtccagctcgtcaagattagagataccatgctccgaaagatagttgaccgctgccgctatggttttcagttcatcggctgtgtgctgttgttgccaacgctgcgaatacttccggctcttttctctctgaacgctcaaatacttcatcaacagatttgcgaggttgggagattgcggcggctgttctggggcggtttcccgcgctttgaacaggtcggcaatccactctttgagctttccaatctgcgcccggatttcccggataaggcggtttgccttttggatatttcggttcagttcgcctttctcggtggcgatacctttcttctccatttggcaagcagccacgcccatgtggacggtgggtatctcgtctatgccgcgctcggcgttgctgcggtggtcgatgcgctccgggcttccgttcctctccaaaaagtcgttggtaaagtcagcccatgccttgcgccacaagagggtgttgtccttgtcgttccagcctgcaaggtcaactttgtgggtcttgtatctgccgcttggcaagcgaatacgctcgccgttctcgtcaaggtcatattcctttttggatttcgctgcccatgtgccgcgctcgtcaagggggcgcatggtaagcatgatgtgacaatgggggttgccgctgtcggtgtcgtgaatggcataatcaacgcacattcctctggaaacaaattgagaggaacagtattcccggacaagccgtatctgttcctctcgtgataattctatggggagtgctgcgtcaatctcacgcgcaagctgggcgttcccggctttctcataaagctccacgctgttccatagaatagaacggtcagagaaagaggggggggcatggggcggcagcatgatttcagaatgaacaacgccgccttttcttgtgtagtcgtgggtcagtccgtcccactcgtttgtcagcttttctccgcttcggtaggcggttgcggcaacggctgatttgccttttcctctgctcacaatgccgatgttccaatggtaaatggctatgggtatcacctcccggataggataataaaacccgcaaaaatggtacagacgccaacggcgggtgtactgtttttgtgggtgtgcagggatagccgcgaagcggcgcaaggggtgcagccccttgttgcggcaaagccgccatatcggagcgcggggtaaaatccctgtgcggagataagccctcggcagagcgcacacgcccgcaagggtgtataagtgcgccctttgttccaaagggatttattcggcgttcccgctttcggctcgttttttcaaaaactcccgcgctggctcactggttagggcaagccggagaagcgcggcggcttcctcgtcagtcatgttctttgcttccggcacaatgctttcaaagactgcgccccggacgataaggcggtggctgcgtgttctgcgttcctctttggataacttctgacgcaacatcttttcccggttttcaagctgccgtattttcttcttcccgtcctcaatctcggcttgcagctcctcgcgggttttctctctcggttttgtcatggttggtcgctcctttctgcctgccggcatagaaaaaggacagtcgattgctcggctgtcctttgtgggtggcttatttagttttactccatcattttcaagtaaataaaatagcttgcagttcctccataaccgttttgagtattccagtcggctattatttcatagatatacccgcccggtttaagggtgagaacatttccgttgatagttacatcttcgctgtttgcggtaggtcttccccaacattcatcactccaacatttcacactaagaatagtatcgggttcttctgtaaatcttagcgtggctgttgcttctggtgtttcatacggcggggataataattcttcacaatctaaagggtgtgggctatcggcatttgtgcttattgaatttccatcaacatcttttttctgccatgaataagtacctaataatgcgctcatagaggtgttatcacttatcacacttaaagcgggtggctcttccaaaattatattggctgttccagagttaagtaattcattcgcatagttgttgagtgcttcgcatggctcatactttgttttataacccacaccgtcaattacaagaaatggattgtatgccataatctctgtctgtgtgccatcttccatagtcagggtaaaaataacgccttgcccggcatattctgtgtaagaattatcttgattatagataatgacatctttcaaatagcctactaactctggaatatcctcaatttcaactgttttgtcagggggagataacagcactttggctgacattatttgtgttgcatccagatttttatatggttttttccccatcgtaagcagaaagactactatcacaatgaataataggataatgcacactgctgcaattattaaccgtttctttttcataacagaagcctcccatcttttagttttatctgctatttgtatagacgcaaaaataagaaaaaagttccacttttcataaatatcatagcacaagactatgaacaaatccacatcattttaacctgtcagcggcgttgttctctctggcatattgccgcgctgcttcccgccgttcctcgctgtatggggcggtcagacggaaagagaaacgccctttctcaatatcaaattccatgcagcccgtttccgggtctgcgtcggtctggcggcatacatcggagtgctgctcggcgtaggtggcaagccgcttcttcaaggcggtgttgtgggtgcggatatggataagcgggtctttctcgtcaaaccaaatatcggtggtcttttcctgcttcgtaagccctgttctcataaactctcctttctgcgcccctgttacgcaataggggcatttttcgggtgtttttcccggctcttgacttggggaaaatgaggattttcaaatagaaaccgcccggacagggaatggttcgtcggggcggctgttatcgcaagatttctgttttttccggctcttgaccgtcagacgcggataaacgcgaactgtcggcaagcaccagtttgagcaacttgtcgcggaatgtttctgtgctgctgtgattgaaaaataactccgcaacaatggtctgcccgttcctctgggtcgtgatgatactgtcgggggtctgttctgccataggcgactcctttctttgggcgtaaaagagggatttcccgtagttcggaaaatccctcttggttgacggttattctgttttactgtgtgggctgtgcggcggctgcctgtgcctttctccttgcccggtattcccgcgctttcataaggtcgaaatggaatacactgtttcgaatgtccatgagtgctttgaaaattgtgtcactatgttccaacaacaggcagaaagtaaaaatcagacgctctctctgacggaacagattatgtatccgtatgtatatctggatgcaccgcacctgtcagaaatctgtttcaacattataagtaacgctataaagtatacaaatacaggaggcaagattacctgtaatgttgtacaggaatcgtgtaaaaaagaagattggtgcaatatgatcatcaccattgctgataatgggattggaatgtctgaagaattccaaaagcatatttttgaagattttgaaagagaacgtaattctacagctagtcatattgagggtagcggaatcggaatgggcattacgaaaaagcttgttgagctcatggatggaaccatagaagtggaaagcaaacaaggtaaaggttccacatttacagtgacgattccatgcagaaaagcgtcaaaagaagactctctggtgaagaaaaatagtgatctgcacaataaaaattgcttgaacggtgttcgaatcttattagtcgaagataatgagatcaatacagagattgcaagagaactattgacggaagaaggatgtatagttgagacagcagatgatggtgttgcatgcattgacatgattgaaaaggcagaggctgattattacaagatgatccttatggatattcagatgccagttatgaatggatatgatgctgcattagccatccgaaaaatgaaggatacgaaaaaatccaggattccgattattgcaatgacggccaatgtctttgcagaagatatacaaaaagtcctttctgttggaatgaatgatcatgttgcaaagcctgtagatatgaacattctcgtgccaactatgatgaaatatttataatagacatctttaatgaaaagcatacgatataatacaaagaaaagattcaacggcgtctcagtcgaaagactgagacgcaaagctatagggtctgtaaaatgacagccagctgcaatgtttaagatgcattgtctggaaagacagtgcatctttttagatttgtgacgtgtaataacctggtgatttgcggagaaaagaaaaaaggataataagaggaaatgaatgaacagaacgataaaaaaacggatagggaaaaaagataagaaaaaaagattatgtttgagcattttagcacttatcatgttactctttgtaccggtttctgcttatgcgtcggaaataaaaagtgacgggaaaacaactcaggcaatggaggaagaaaataaaaccgtgagagtcggctatttcccatatgccaattttcaggaaggcggctatggggaacataagcagggagcaggctatgagtatctccagaagatttcttatataaccggctggaagtatgaatatgtctatggttcatttaaagagtgtctggatatgctggcagatggggaaatagatctacttggaagtgtcagttatacaccggaaagagcagaatctatcgattattcaacctatgccgagggtacagagcgatattggatctataccagggaggaacatgcggatcttgcggatggcgatctgaagcagatgaatggctgtcgtatcggcgctacagatggaagctatcagaaagaacttctggaaaaatggctggacagtaatcagatccaggcagaggttgttatctgtaaaggctatgatgaaatgatagaaaaactggatgcagatgaactggatgcacttgtggtcccagcgctgtccgtcaacagtgattttattgcaattgccaatatcggtgcaggtgactgttatttcggtgtatcaaaatccagaccagatctgttaaaggaattaaattctgccctggaagaaatcaacaatactgaaacagactacagcagcaagctgtatgcccgttatgaaggaaaagcggtcataaattatgcactcaacaaggaagaaaaacaatggctggatgcacatgaaaatacaatctgtgtgggatatctaaaagataatcttccgttttgtggtgaagaaaatgggaaactgacaggaattttaggaactgttctggatactgttcaggaaaagtataagatcacgatcaaggcggttccctgttccacgggagaacagatgaatgaggcattgcaatctggtgaaatcgatattgccggtcctatcattcaagatctatatacacaggaacagtttcaggtgattttgacggatgaaatctttgatattacgccggttgttatttacaaaggaaatgaatataggagcagtctctctacgatcgcagcgacagatacctcactgtattctgaattgatggtgtcctttctttttccggatgcagaaatcaaacaatatgatacacaggaagaatgcctgaaggcagtagcaaatggaaaagcaggagcaactgttatcccatcttcaaagattaatcttcttaatgaaagtccaatgaccaaaagcctgtcatttgcagagatggcaaaacggcaggaattagcgttgttcacgacgagagaaaacagaagagcagctaccattatcaataaagcaattgagcagtcctccaatgttttgaatggtgttgtccttgcacagaattctgtttcagaaaagaaaatgaccctgcaggatgtatttgcagagtatggaggcttagctgtcggagtttcatttgtgattatttttgtactgcttcttctggtttattccctttcagtaagcaggaaaaaacagatggaagccctgaaagaagcacagaatgcaaatgcggcgaatattgcaaaaacgacattcctgaaccatatgtcccatgatatcagaaccccaatgaatgcaattgttggatttacagatattgccatgaagaggaagccggacaaagaagtagagaattgtctgaaaaagatcaggcagagttcagaatacctgatgacactgattaatgatgtgctggatatcagccgcattgaaagcggtaaactggaatataaaccggtaccggtagatctcagggatataataaatactgtttcgtcgattgcaaggggatatatggaaaatcgtgaccttaatttttgtgtttcgagagaagaactaaaaactccttatgtgatggcagatgaactcagaatcagggaagtattgctcaacattatcagtaatgcagtcaaatttacaaaagacggaggtgctatttcatttgctgcagaaaactgtccgggtaatgatgagcaccatgtgattgtacgctatcgtatatcagataccggaattggtatgagtgaggagtttcagagcagaatatttgatgagttcactcaggaaaatgatggagcaagaagcagttataagggaaccggactgggaatggcgattgctaagaaatatgtagatcttatgggtggaaaaattgaggtcagcagcagacagggcgttggttccacatttactgtagaaattccactgcgtatagcagaacagatactgactgaaaaggaagaaaagctaaggaaagatatggatttacatggtctgcatgtccttttggcagaggataatgatttaaacgccgagatagcagtctctctattggaagaacaagggatgattgtaaccagggctgcagatggtaaatctgctctgatacagttttgcaatacagctccggggacttttgatctgattttgatggatattatgatgccggaaatgaatggatatgaaacgacaaaagctataagaaatctttcggatcgtccggacggaaaggagatccctattattgcaatgacagcaaatgcatttgcagaggatgtacaggctgctttggatgccggaatggatgaccatgtggcgaagccgatggatatggatattttaatttctgccatcgaaaaatgtgtgaaacgatgattcgtctgatggaaaaatgaaaaagccaacgatatgggatattctgtttatgctgttggaaaatcaggatttgctaaaggagatggtaaatatgtggtggtctatttgccctatttggaattattatgattatgcttccggttattttggaataatgaattccagtttgaagggatgacaagtgtttcatttgagtaaagcaaataaaacgatcacgattaataacgccggtgcaggatttttataaccctataccggcgtttgttgtttacatgagaatgtgttttatatgcttattataaaggagtcagcatagatagacaacaattcatgcagagaaatataaagacagaattctcaaaattcgagaaatataaagatgcaattcctcatggtagatgtgtattgtgaaaaataaatttgttatagtgacaatatcaacaaaaaacagaatatagatggggtgatcagatggaagcagcacagagaattcgattaatccggattatagaaaagatggagaaaaatccagcattcaataataagcttggaataaagaacacatctgaatatttatcagaaaaagaacagaaaaaatgaaagacacatatcagaatgagtttcagaaggagtaaaaaatgttatcgttattatttgcaatttgtatgatttggtttgttggaaaattttttatatttggattaaaagcatcctggggaattatgaaattactttgtacagttattttcttcccggtgatattgattggtatggttataggtggactgatgcacattgcttttccattgttgattgtcggtggcattatagcattggtgacgtcacactcataatcgatcaggaggaagaaaacgaatgggatatgatattgaaaaagaaaaaagagaagcaattgaagctgggcgtagggctttgaacagtcttcagacagcaaaagaaaatctaaacagtgcaaagaactggggactggtagatatgtttggcggtggctttttcactacgatgttaaaacattctaaaatggatcaggcgaagcagaatatggagcaggcaaagtatgatctccgtaatttcagcagggaattaaatgatgtaaatatggcatgtaacttgaatatcgatactggagatttcctttcttttgcggattatttctttgatggctttgttgtggactgggtggtccaggatcgaatcaataatgcaaaaagacaggtagaagaagcaattcgaagaacagaaagtatagtcaatcaattacagcgtatgtaaaggaaaaggcaatgagtcagaaatggttcattgcctttcttggcgttatggattattttaatttttctttttcggcatttaagagctcaagattaagcccctgttctccggcggtcttatctacccagagattcaaagagtctatggctaaagaaatttcatcaagttttttactgatataagcaaaatctttcatttcatcatcgctgatcttaccgtcacgggcaatctggatcagacgaccggtaagaggattgatttcattcaaactggcaattgtctccaaaatgatatttgacagatcagtcacttctacttctggaacatagcggtggcctatttcacatttgtgtgagcagtaatagttgcagagatccggtcgcttataagcatcagccatttgaatgatgtcgtaaggtgtaggctcctgtgtttcgtattcgaatttttcgattttagaatccgagacagcctccattttatcacttgcttctgcccttgtaagccctgcagcttcccggcaaagctggtaaattgttttgttttccctggtagattgtttacccatgagaatttcctccccgtatatcgcagaacatgagaatcatcaatacataagatcacatgcaagacgtgtatttcttatatagagtttatgtaactattcagtagccactgtcccgcgaggtgtttttatcgtttaaatgcattttggctcgtaactgtgaaggtactgaacagttacgagtttattatacttgaatcatcagtcaacaacaagttcataaatggataggaagccagaaagagtgaataaagaaagagaggtagtaaaataagacgaacaagaagtgacaaaatttgcattttgtatattgaagatgtaaaatgaattcttgcggaaggagaaataagacaatgtcaaaagatgaatatttaatcacagatgcgccccttaaagcactgactgtttttgcaatgccgatgattctgggcagcttttttcagcaagtatataatatggcggattctattatcgttggtcagtttgttggctcctctgcacttgcggcagttggtgcctgtgctgcacttacgaatgtctttatttgtatagcattgggtgccggtgtaggtgccggtgtgcttgtgagtcgttattttggagccagagattacagcaaaatgaaaacaatcgtgtcaacatcactgatcagttttctgattctaagtatacttctgggtgtctttggcttttgtttttcccattcgatgatgaggttattacagacacctgctgatatactggaggcagcagtactgtatcttcgtgtttattttgtgggctttccgtttttgtttatgtacaatatcctttcaacgatgttcacatcgatcggagagtcaaaaattccactgggtcttttgatattttcttctgttttgaatatatttatggatctttggatggtggcaggacttggcctgggtgtgttcggtgcagcccttgcaactctcattgcacaggggatttccggagtgttttcacttttgattttctttagtcggatgcgccggtataaaagccattttgcctggtttgatgggagagagttacgttctatgcttcgaatcgccgtaccatcagttctccagcaatccacagtatcaattggtatgatgatcgtacaggcagttgtaaatccattcggtacacaggcactcgccggttattcggcaacgatgcgggtagaaaatgttttttcactgatttttgtatccattggaaatgcagtctcaccgtatgtatcccagaatcttggcgcaaagaaaatagaacgtctcaaaaaaggatatcacgctgcactggtgttggatctgtggtttgcagttcttgcttttgtagtcattgaaacactgcatactcaaatttcctcgttattcctggggaaagatggaaccgctttagcatatcaggtatctggggattatatgagatggctcggttactttttcattttcatgggtatcaagatggcaacggatggcgttcttcgtggacttggaatcatgcggccttttctcattgcaaatatggtaaatctggcaatccgtctgtcagttgctttgatctgcgcacctcgttttggcatcgtatttgtctggcttgctgtacccgcaggctggcttgctaattttctgatttcttatgtggcactcagaaaatcatggtcaactgaaaggggagatatttaacaactatactgggatttttcgttgacatactaccttctatttgatattatttatcaagtaataaaatattccatgagggagtagttagcgcgaaagtgtggtttgtcaacattctgattgtagtacagagtacaatctggcaaatcttaaataatgagactcatgtatatctttgcttcggaataagaagtctgatccgaggtgaagatatacatgagtctttttttacgcaggcagcgggtcgacgtcgtatctgtaccaaccagcagagtgctgtaagctgctggaagacaggaaaagatgttgggatgacggaaactcatggagagaaaaaaggaggaaactatggaaaactttattaacaatgctccatttgcgctggttctggttgcacttgtgattgggtttgtgctgttgatcaaaggagcggattattttgtggagggaagttcaagtgtggcaaagcgtttgcatgtgccggcaatcatcatcggacttacgatcgtggcgatgggaacgtcgcttccggagacggcggtcagtgtgtcggcttctcttacaggaaataatgaacttgctgtgagcaatgtcgtaggttccaatatctttaatctgatggtggttattggtgtctgcggcgtgttggctacggtcaatgtggcaaaagagacgattcgaagagacatcccgttttcactgatctgtgccggtatgttactgctctttggaatcgccggaatcggagatacatcttcgatgatactggggcatctggatggcgtaatctttctgggatgctttgccggttatattatctatatgatccgtacggcgatgaaagcaagtaaagaaggaaaacaggtggagattgaaggtggttcggacgaagagatcaggctgatatccatgccgttaagtattatttttatcgttggtggtgcggttgccattgccattggtggagatgttactgttgatgcggcagcaagaattgccggtgatcttgggatgagtcagacgctgatcggacttacgatcgtttccatcggaacttctctgccggaactggtaacttcaatcgttgcagcaaaaaagaacgaagtagatatggcacttggaaacgcagtgggatccaatatatttaacattctgatggttctcggtatcgcatctgcgatcagtccggtcagcatgatcagagaaaatatcattgacctgtgtgtgctgattgtatttaccgtatgtgtgtggatctttgcggcgacaaagaaacggatcggaaaagtggaaggattctgtatgatcgcactttatgcggcgtatgcgatttatattgtgatcagataataattaaaaacaattattgaatcacagagagggagaacatgttattatttttaaaggtatttttcacggaatttatcgcagaaatgggcgacaagacgcagctgatgctgatcgcgctgacttccaagtataagttaaaagatattatcatgggaacggcgatagcgatcctggtgctgaatggtcttgcggtattggcgggcggactggtcagcgaatttatcccggaatggctgattaagattgttgcagcttttgccttcctttattttgcggcatcgacgcttgcaggagacgaggatgaagaggaagaagagggcggaaagagcaagatcaaatttgctcctctggcagtgttctgtacgttctttgtagcagagctgggagataaaacacagctgacagccattacctttggtgccaatgaagggatgggggctgcgtttatcgtatggatcggatgctctctgggactttttttagcggacattcttggtatgctggtgggatatctgttaaagagcaagactccggatggactgttaaatacgctggcatttgtgatctttgcaatcttcggtatctacacagcctatcaggcactgaacctgatcagtgaaagcgtctgtccgatcaccgtatggccgcttctggcagctgttacggtggctttcgtggtgatttgtgtctggctttatatgaaaaagaaaaagggccaggatgtgtcagcggataaaggatagtttttgaaggataagaagcctgtgggtgatcgaggatacgattgccggacagatttctgagaaaaatataagggaacagatcgttgtacaggtctgttcccttatatttttgccttatattattttaatgtgaattcgagatataccggatcatgatccgaataggtgtattcggtgttgatgttgtcgtaggagacgcattcgatattgtctgagataataaatccatccagtgttacggtatatgtttcacccggcacatattccatgtcagcgtttctggcgctgtcccacagggaatcccgttcctcgtacgtcagctgatcgatgcagaaagaaaagtggtcaggaaggctggctctcgggaaggggtatgcccaggactcgcgattttcggaatcgtcctcggaggctttcagatcatggttgaaatcaccgccgcacaggacataattgccggcctcgtattctttctgcatgtcatcggcaagcatacggatctgaccctcacggattgcgtcgctgttgccgtaggcggacatgtggagttcaaaaattacaagttcttttccgttatccacaggcagtctggaaatactgtagcagcgatccaggtcaaaaaatttactgaaggatgtagacaccgggaaacttctccgcagagaatcggtcaccagatatctggaaaacagagcaagccccgatttgctgcttccatgtggctgtgtaaacggatagaaaagaaacgcggagtcatagttctgtgcgaagacagaattgtaggaactcaggcaagtccttaagatggaatattcgtttacatgataacttctggtggaatcaagatctacttcctgaagcaatgcaaaatcaggttcataagaagcaatgagttcaccggctccctgtatggtgttctgcacactttctttgctttttgcccaggaggatctgccgccgtccatgaagaaactgaagtccggtgtgtaagcaccgaaaccaaggttgtaggtcagtgcggagtaggtttccccggtagtcagtgccgtgttgtaccgtgcggatgcagaatccgggcgggctccggaagtcagtccctccagatcttctccggcgtcaggggcagattccacttccagaaccagattgtcttcgatgcgatgatagctggcatagagatagatgatataagcgatcagcaccagcaaaatcaccccgagtacgataccaagtactttaaaaattttctttacggtttttttcatagtatgcctttctctttgtaaaatccaggtaaagtttttatttctttgagtgtatcatattcagggtgaaaactctatagttctgttatccgatcggttcaaaatcagcagctccgtgtttacacagcgggcagatgtagtctgccggaagttcatcgccctcgtagatataaccgcagactttgcagacaaaacctttctttccttcggtttccggttttggttttacgttgttctggtagtaggtgtaagtcatggtttcctgattgctcatcacgcgggcttcggtcacgctgcagataaacataccgtgggtaccgagatctacatagtcttctactttgagagacataaaggcattgatgtatttatccaggaagaccagtccgttgtcggaacggtgtacggtctgaccggcaaatttatccacgcttcgtccggtctggaagccgaactgctcgaagacggagaacggtgcttccgtggacagacagttgacatttaacataccggtctgtttgatgacatggtgtgaatagtttgctttgttgatattaactgctacacggttcggggtatcggtcagctggatgacggtgtttacgatcagaccgttatctttcttaccgtcgttagaagttaccacatacaggccgtaaccgatccggaacagtgcggtcaggtcatttttattggcaagggtgtcgttctgggcaatgtactctttgcacagttcatctgccatggcttccagctgatcctgattgtcctgattgatggcagagagaatctttacggtggtatcgagccagttgatctttttacattttgccatcatctcacgcatcactttggcagccagcggagcccaggaaccgttctcgatcagacctaccgtacggttctggaagttgtgttccaccagacgggagatatagtcgtgcataaacggatagatgcttgcgttgtaggttgtggtggcaaggatcagtttgctgtagcggaaagcatcggagagagccagggacatatcgtctcttgccagatcgtatacgacaaccttcggacagcctttgcttcttaatttgtcagccagcagatcgactgcttttttcgtatgaccatagacggaagtgtaggcgatcacgatgccctcttcttccggtgtataggaggaccaggtgtcatacagaccgatataatgtccgagatcttctgaaagtaccggtccgtggagtgggcagatgatccggatatcgagggttgcagccacttttaagagggactgaacctgtgtgccgtattttcctacgatgccgatgaagtatctgcgggcttcgtcatcccagtcttcttccacatccagggcaccgaatttaccgaagccgtcagcggagaagagtactttatcagtgctgtcgtaagttaccataacttccggccagtgtaccatcggagcaaatacaaaagtcagctgatggtttccaagacttaacgtgccgccgttggtaacttcgagcttctgtccctccagagtaagtccgaaaaagttgtagatcatctggaaggtcttcacgttggcgacaacggtggtgtccgggtaaactttcaggaaattagccacgttggctgcatgatccggttccatgtgctgcacgatcaggtagtccggtttgcggccatcaagtacctgctccaggttatccagccattcgtgggtgaagtttgcatctacggtgtccatgacagcgatcttttcatcgaggatcacgtaagagttgtaagccataccgttggctaccgggtactgtccttcaaataaatcaactttgtgatcgttgacgcctacgtatttgatagtatctgtgattttcatatatgagaacctcctgtgtgtggaatctgttttcttgttatcgttagtatacccggaaaaaccggaaaattctgttgcaaaagcaacaaaataggagtatgttaaaaaaaacacaaaaaagaaagatggggcaatacagatggagaaagtgacattgttttcacatatcctgccggaagaacaggagcgaatgtggatatgttttcagatgcgtgagattgtatatgaaaataacgagatcatcatggagtatacggatacgatgaaaaagatcggtttgatcgcggagggacaggcttctttatatggcagcgatgcggagggcaatcagtatctgatggatgaactgaaaaaagatgatgtcttcggggaaccgctgctgttaccggagatgtcgcagcattattatgtctgtgcgaaggcgaagacgcgtgtgatctttatcgattatgagcatgtgatcaagcggtgtgaaaatgcatgtgaatttcacagccagatggtcagcaatctgttacagatgatcgccatgcgtgccagccagcaggcaaaccggatctatgtcttatcgagaaacagtacccggaaaaagatcctggcgtatctgtgtgaggcagcaggcgagaatcaggatcagccgttcaaactcccggtttcttatacgactctggcagaatatctgtgcgtggaccggagtgcaatgatgcgggaatttaaaaatctgtcggaagagggcgttttgttccgggaagggaagaatatacggattttgttgtaaaatggaagaaaagagatctataattaagaaaaataaggaaaagaggtacgtgtatgaaactgacatttttaggaacaggagcaggggaaacatatccgggatactggtgtgaatgtcctcattgtacttatgcaagaaaacacagaggaaaaaacctgagaacaaacagcagcatggtgattgacgaagagctgctgatcgatatcggaccatcgtgttttgataatgcagcccggttcggagtgaatttatcaaagctcaagacacttctggtcacacatcctcatgaagatcatctgtatccgcagcatctgcactggagaaatacagacgaaagcttgctgccgcttacttatgtcgaaaaaatgagacatggaggtccacggtttaccgatatcccgcagctgaatatttacgggaattcttttgtgatggaaacactcagaaaaagtctggatgacatggaagaactgaaaataaatctgcatgagatcagagagggaaaggaagagaaaacggatgggtacagaatcttgccggttcgcggaaatcatgggtcgcaacggggattttcccacagttatatcattcagaaagatggaaaaacgttattgtatgcgctggattccggaagttatgacgaggatcagtttgcattgatacaggaacatcagtacgatgcagttattatggaaggaactacaggactgaatgaacagtatggcggacatatgtgtctgatgaacaatatccggataagggaccgattgaaggaaaataagtgcctgcgtgagaatagtagatttcttttgacgcatctgtccccacactggtgtccgccgcatgactggtacgaatcgattgtggcgtcagaaggactggaactggcttatgacggtttacagatcgaggtctgaaaggaaataagaggttctgcataaaaacaatgtgaattttttgtcaaatatagtgaattgaccggtagtcagtgtaatgttacaatgaaggaaaccgggaaactgttctcagtttcccggtttcctttttcgctgaaccgtaaatgagaacaggacaggagagagaaatgagagaaaaaatcattgatacagcaattgaagaatttaccaggaatggtttgaaatttacgatgaatgatgtagcgaaagcgttggggatcagtaaaaaaaccatctatacggtgttcgagagtaaacaggatgtgctgatggcgattgcagaccgatatgcccgtgattttacggatatgcggcaggagatcgaggcggataccgaactggatacactggaaaagctggaacggctgttttgcgcaattccgaccaagtattataacatcggacttagcaggatcttcgaactggcacagaagtatccaaagcagtataagtacctgatggaagcagtcagtcaggggtgggcacttgccgagcagtatctggagaaagggatccgggaaggaaagatccgggaggatatctcgaaaccggtcgttatggcgatgatccggggaacggtaacctgctttctggagagcgatattctctacaagaacggactgacctacgaacagggaaaagaagagatggtacagattatcatgaaagggataagagaagcgtgaaagaggtaagagtccttgagatcaaggagagcgtatttgcagacaatgaccggcaggcggataacctccgccgggagttaaaagaacagggagtatttctgatgaacctgatgtcttcaccgggatccggaaagactacaacactgaaaggaacgatcgagcagttaaaggatcggttcaggatcggtgtgatggaagcggatattgattccgatgtggatgcaaaggcgattgcagaaacaggtgtcaaatcgatccagctgcataccgggggtatgtgccatctggatgcggagatgacccggcagggcgtggagggtcttggcgtggccgatgtggatctggcgatcctggaaaatgtgggcaatctggtctgtccggcagaatttgatacgggtgcatcgaaaaatgtgatgatcctttctgtaccggaggggcatgacaaaccgctcaaatatccgctgatgtttcagatctgtgatgcggtgctgatcaacaagatcgatgtactgccttattttgatttcgatatggaacgggtgaaagagtatatccatcagagaaatccacaggcggaggtatttccgatcagtgcgaagacaggggaaggcatggatgcgtggaccgagtggctggctgcgcaggtaaatgcatggaaaaccggtgtctgagatgatatgacagtgacaaaagggaagtgtcggctattcaaactcagcgatatcggacggtctgtccgaaaggaaataagaagccggcgctgtgtaggaggatgaaaatgaagaaagaactggataaagagctgtatccggattatgtctatccggaattcaccccggatccgaacgaaccgttccgggagccgatcgcgaaactgggcaaaaagatcacagaccggattccgcagaaactgggattgaaaaagattaccagaaacgatccggagtactggggacttgccggcgtgcttaccgatgaggaagcagaactggcagtaaaacttggtgtgagaaaaccgaagacactggcagagatcgtgaaactctccggtctggaagagaaaaaatgtgaagcgctgctggaagaaatgtcaagaaaaggtcttctggaatacaactgggagaatccgaagcacgaaaaacagtatgtgttaccgatgtatgtaccgggatgtgcagaatttttcaacatgaacgcaaacatcctggactctaacccggagatgggaactttctttgaacatatgtcccgtctgccgctggagaagatcacaccgttcgtgccggaaggcggtgctggtatcggtatgcatgttatcccggtggaaaaagcaatcgagatggaaaatgaatccgtagatctggaacatatttcccactggctgaacaaatatgagggaaaatacgcggcaagcccgtgttcctgccgtcgttcccgcctgacccacggagagggctgcgcggacgatccagaaggctggtgtatcgccgtcggagatatggcagattatgtagtggaaacacagaaagacggacgctatatcgacaaagcggaggcactggagattctgaaggcagcagaggacaacggattcgtacatcagatcacaaacatcgacggtgctaacaaaatctttgcaatctgtaactgtaacgtgaatgtctgttatgcactgcgtacctcccagctctttaacaccccgaatatgtcccgttccgcttacgtggcgaaggtagaaaaagccaactgtgtagcctgcggaaaatgtgtggaattctgtccggcaggggcggtaaaactgggtcagaagctgtgcgacaaagagggctgcgaagtaacctatccgcggatcccgcttccgtcggaacagccttggggcgaacacatgtggtcacataactatcgagatgtcaaccggatcaactgctacgataccggtactgcaccatgtaaaactgcctgtccggcacatatcgctgtacaggggtatctgaaactggcaaaagagggacgttacgatgacgcactggcgttgattaaaaaagataatccgttaccggcagtctgcggacatgtatgtaaccgcagatgtgaggatgcatgtaccagaggaaccgtcgatgaggcggtagccatcgatgaagtaaaacgattcctggcagaacgtgacctgaatgcggagacgagatatatcccgaaaaagacgattccgtccctgaagggtggatttgacgagaagatcgcgattatcggtgccggtccggcgggactttcctgtgcgtattatctggcgctgactggatacaagccgaccattttcgagaaaaatgaggaaccgggcggtatgcttcgttacggaattccttcctataaattagagaaagatcttctggcagcagagatcgatgtgatccgggaactcggtgtggagattcgctgtggtgtggagatcggaaaagatatcacgatcgaagaactgcgggaacagggatacaaaggtttctacgtggcgatcggatgccagcgtggaaggaaaccgggtatcacaggagaaaatgcaaaaggtacttatgcagccgttgatttcttgcgggaagcgggagcgaaagaaagctttgcgcttgaaggtgatgttgtggttgtcggcggtggtaatgtggccatcgatgcggcgagaatcagcagccgttgtgtggatgcgaagatttccatgttctgtctggaacagcgggaacatatgccggcaagtaaggaagagattgcggaagcactggaagaaggcatcgagctgaactgcggctggggaccgaaagaagttcttgaggaaaatggtaaagtgaccggtgtggtatttaaaaagtgtacccgtgtactggatgaacagggaagattctcaccggaatacgatgaagagcaaactgtgaccataccttgtaagcatgtgatcttttccgtaggacaggcgatcgaatggggtaatatgctggataacctggatctgaagagacggccgaacggcggtgcactggcagataaactgacctatcagacctctgagccggatattttcgtcggcggtgatgtgtatacaggaccgaaatttgccatcgatgcgatcgcagcaggacgggagggtgcgatttcccttcatcgttatgtacatgaaaactgtaccctgaccataggaagaaaccgtcgtgattttgtggagctggataaaaacaatatttccgtggacagttacgatacatccaaacgccagatcccggcgaaagcagatgaaaaagcacaggcagcgaccttccgcgacctgtctcacagtctgacggaagaacaggtaaaagcagagacttcccgttgtctgtcctgtggagcttctgtggtggatccgaataaatgtatcggctgtggagtatgtaccacaaaatgtgtctttgatgcgatccatctgcacagagagattccgggagcgtctgtgatgcgggcatctgaggataaactgaagtatattcttccgaatatggtgaaacagtccatcaaagtgaagtttgcgaagaagaaataggagaatgcagatatgcatgaacttggcgtgacatttcatatcatggatcatctggaaaaggtggcaaaggagaatgaagtggaaaaaatacggaaagtagtgctggaacttggggaggtctcgacggtgatcgaatcctacctgcagaactgctggacgtgggcggcgaagaaacggccgctgtttgaggaagcagaacttattgtggagacacttcctgcaattacatactgtgaggaatgtgagaagacctattcgaccatagaatatggaaagatctgtccgcactgtggcagtgaacacacgtatcttttgcagggaagcgaattcaacattaaggaaatagaagtggaataaagattccgcgtaagaaaaaggagagtgagtgtatgttttttcagatttatggagaaacagcaggatggcagctgcttggctggctgttagtctttgcaggactggtaatcatgaatgagatcgcaaggcggtcgaaatggggaggaatcgcatgtttcctggtgctcccggcggtattgtctgtgtactttattgccatctatatcggtgcggcatccggtgcggaatgggcgctgaacaatgatacttacgtacatatgaacagctggttccattatgcgaaactgtatgcggcaaccgcaggctgtatcggatttatgatcctgaagtaccactggggaaaactgggaaaagcacactggttcaaagcatttccgtttgttattgtagcaatcaatatcctgatcgcagtagcatctgattttgaatccgcgatccgcgcaggttctctggcaggcggctggtggatgtcatcggaaggcgtatggctgtacggcggctggtggaatgtactgaacggtctggcagggcttttcaatattgtttgtatgaccggctggtggggtatctactcttccaaaaacaaacaggatatgctgtggccggatatgatctgggtatacgttctggcttatgatatctggaacttccagtatacctacctgaacctgccgacccattcctggtactgtggtctggcactgcttctggcaccgaccttcgcagcagccttgtggaacaaaggcggctggatccagaaccgtgcaaacaccctggcactgtggtgcatgtttgcgcaggtgttcccgctgtttcaggatgcgagtcgctttacaaccgtaacatctgtctatggagaaggcggtatcgcagcagcgatgggaagcaccatgccgaccgttgccagtccgacagcacagggactgatctcggtagtatcctttgctgtgaatgtgttcgtatttgcttatatattaaagagagcaaaagcacagaagaagaacccatggaaagaagagatcttcgtggatacgaaagattatcaggaggctatggcgagagcaaaataaagaaaacatatagaaaagatcccgtacaggtgaggataaaactgtacgggatctttttgttataggaaaaacctatagccaatcctaaaaaattcctataactacatttattgacataaaaacgtataagtgatattatctctacaacgaatacaacatactaattcgataggaataataggtaatacaaaaacaggcacaggagagagaaaaggacgacaagctatgtatattgaattaaaaaatatcaataaatccttcggtgattttcaggcatcgaaagatgtgaactttgcaatcgaaaaaggaaaactggttggtcttctcggaccgtcaggaagtggaaagacaacgatcctccgaatgcttgccgggctggagcatcaggattccggagatatctgtatcaacggaaatgtggtaaacgatcttccttcgagccagagaggaattggattcgtatttcagaattacgcattatttccttatcttacggtatatgacaacatcgcttatgggttaaagatccagaagaaagataagaaatttatcaaacagagagtaaccgagctgctggatctggtagggcttccggggctggaaaagagatatccggatcagctctccggtggtcagagacagcgaatcgcacttgcaagagcactggcaccgaatccggaagtactgcttctggatgaaccgtttgcagcaattgatgcgaaagttcgacaggaacttcgtacctggttaagagagacgatcgataagatcggaattaccagtattttcgtaacacatgatcaggacgaggcgatcgaggtggcggatgagatcatcattaccaacgagggccgcgtagaacagatgggagatccggtggagatttacctgcatccgaagacaccgtttgtggcacagtttatcggaaaatcttcgatcattgaagaatacggaaagttaaaaggatttgattccatcggatcggatacgagggcaatcatccgaccggaatttgtagagattaaaagcccgaaagatgtgacggaacagagttctatctacgaacaggctgccgtagaacagagtatcttccgtggcaattacttcgaggtactgttaaatatcaagggtatcactataagaaccaattccccgctggtcaacggaccgttaaagagtggtgacaaagtatgggtagtcatcaatcagatgtatgtctttgatgataagacgacaacgacactgacaaacaaaggactggatgtatccagtatgtactatatttaggaaggaggcagaaagccatggcgtcacagacagcaaatacaaaaaagacaggcagttgggatctgcctttgaaggttatcaaaacaggaatcgtctcctggctgatcgtttttctgttctggggactgggatccttacagtatgatgagatcttcctcccaagtccggcagagacctggactgcgatcaaggaactggtaagcaacggcacattgtgggcggacattgcagcatcagtaaaccgtgtactgaaaggctggggactggcggtagttattgccgtaccggtcggactggtggtcggacatttcaaaccgatccgctggatcgtggaaccgatcttaagtctgtttcgttttatcccggccatcgcattgacatccctgtttctgatgtggtttggggtggatgatacttccaaagtagcactgattctgtatgcagcatttttccaggtgctggtcaatacgatcgcaggagtggttgctaccgatcattctctgatggaggctgcatcctgtatgggcgccagccggctgagagtgtttttcaccgtggtactgccttccgcagttccgaatatcttcaccggtatccggctgggactcagtagcagcatcatctgtgtgatcgcggcagagatgctggttggtaacgacggtcttggatatctgatccagagttccaagatgtactacaaaacagcctgggcattcgcaggaatcgttactctggcattgatcggattcgttgcggaccgtctgcttcagctttttggttgtacattcttaaagcacttcggagtgagaaaagcgtaggaatccggaagagaaaaatatctgcgagattgcgatatgaggagaaagcagtttcgcggaaaccataaaacagctttagaaagaggaggaaacattattatgaaaaaaagaatcatcagtttggcagccgcagcagtttttgtcattggaacacttgccggatgcggaaatagcagcacacagacaacagacaaaacagcatcctccgatgcatcttcatccggtggagatctggtgaccgtgagagatgcagtgatgaccggtcagcttgatcagtatgcgacagaaattggtctctggcaggggatttttgaaaaatacggcattgacttacagacgacagagtttgtagccggtatcaataccatcgatgcggtagtcaacggaaccgcagacatcggaatgatggcagattatgcagcagtcaatcgtctgggaaataccctggatgccacaaacctgcagatcttttctcagatctccggtggtcaggcagccctgtccggtggtctgtatgtagatccgaaatacgcagatgatccgaagagcctggatggttccgcaggattcatgtaccaggaaggaacggtaacttactactatgcaagtaagtgcatcgaatatctgggtctggatgaaagcaaacagaacctgattaacaccgattcttctcagaccagactggcgctgatccagaaaggcggtgcatccgctgtgtatgccaacggttccgaagcaaagtatatcgaagaagccggctgggtacaggtggcaacttctcaggaaatcggtattcagaccggatcctacttcctgtcaaccgacaaatatatttcagaaaatacagatactcttgcaaagttcctgcaggctgtcgatgaaagtacgcagtatatcaacgatcatctggatgaatctgcagaatacctggcagacaaacttggtctgaaagcagaagactttaaagaaaactggaaaaactacagctttgagcctggattttccgaggaagcaacgacacatctggaagacatcgaaaaatggggatttgaacacggaagtttcccgaaagattacaatgtccgcgattttatcaacgccgatgtggccaaaatcgcatttccggataatgtgaccatcgaataagagacaaaggagaaccgcagttatgatacaggaactgaacgtaaataattttgaacaggaaatcaataaagacaaaccggtggttgtagagttctacaccaccgcatgcagccactgtaagaagctggcgggtgcattaaataaactttccgaagaaaaaggagacgatgtattcttcggaaaatgcaacattgatcaggaagcactgttacagagcagatttgatatctcagcggtaccgaccctgctgtttatcaaaaacggagagatcaaaaacagactggtgggtgaggttcatccgctgatcattcaggaagagattaaaaaactggcatagagaaaaaacagatcacaggaggtaaaagaatatgggttatccaactgtatttccaacaggagttttagtatataacaaagagaaagcgtataacggctacaccatctatccatccgcaaaaggagcacttctgattgatatgaacggaaacgaagtgaatctgtgggcaggtcttggcggattcccgaacaagatccttccgggtgggtatgtcatgggaactaccggagagcgtggtggaaaatatgcatatcaggatcagctggatctggtgcaggtggattatgacggaaatatcgtctggaaattcgatcacacggaactgatcgcagatccgggaaaagaaccgacctggcaggcaagacagcatcacgattaccagagagaaggaaataccgtcggatattattatccgggcggcgaaacgaaaaccgacagtggaaataccatcatcctgacccatgaaaatgtatacaatcatgagatttccgataaaaaactgatcgatgacaagatcatcgaagtagactgggaagggaatattctgtggagctggcgtgcttctgatcattttgaagaatttgattttgatgaagctgcaaaaaatgttctgttccgtaatccaggacttcacggagaagccggtggtgactggatgcacattaactgcgtatctgttctcggagagaacaaatggtacgatgcgggagatgagagattccatccggacaacctgatctttgatgcgagaaatgcaaatattctggcgatcatcagcaagaaaaccggagaaatcgtatggcagatcggacctgatttttctaaaacgaaagagcttcgcaaactgggatggatcatcggccagcatcatttccacatgattccgaagggtctgccgggagaaggcaatctgctggtattcgataacggtggtgaaggtggttacggtaatccgaacccgtccgcaccgaccggtaacaacaacgcacacagagattactcccgtgttctggaatttgatccgatcacactggagatcatctggcagtacaccccactggaagcaggaaacctgttatttaccgatgcttccaagttttacagttcctacatcagttccgcacagcgactgccaaacggcaacacactgatcaccgaaggatcagacggacatctgatcgaagtgacaccggaacatgagatcgtatgggaatatgtgaacccttactttaaaaatatcggcggaaacttcaagatgaacatggtttaccgtgcataccgcacaccatacgaatgggtaccgcaggcaacacatgcagaagaagtatctatcgagccgctggatgtggaaaccttccgtgtaccgggagcatccaaaggagcaggaaccggaaaggtaaccgtagttgcaggggtggatccgaaccgttccagcgtaacaggcatgaatggggatgacgaagacagtgatgaagagagactggacttctgcgtggcttctgtaaagaagggtgatctgaaagaagaataataaggaaacgaaagatatggtatatgatgtaagtatcatcggcagcggcccggcaggtttaagcgcagcgatctatgcgaagcgggcaaacctgtcagctatagtgatagaaaaagaatatgaaggaaccggacagatcgcagagagcggtcgggtagacaactatctgggaatgccgggaatcagcgggtatgatctgggagagacattccgggaacatgccgtaaaactcgaagttgaatttctggaacaggaagtgaccaggatccaaaaagaagagtccggacagtttcagatgaccttctcagacagttctgtgatcgaatcaaagaccgtgatctatgcagcgggagcatccccacggagggctgatattccgggagaaaaagaatatgtgggaaaaggcgtttcctactgtgcaatctgcgacggatctttttaccggggtaaaaaagtcgccgtgctcggcggcggagataccgcactggatgatgccggttatctggcaggtctggcagagcaggtgtatgtgatccacagaagaaaagagtttcgcggtgcagctgccacggtagaaaaactgagagaaaaagagaatgtcacatttgtactggaacatcaggtgaaagaaatcaccggaaaagcgaaagtgacaggtgttgctctggaagacggaacagtgatcgatgtagatggcgtattcgtagccttcggatcggttccgcagacggtactggtaaaggatctggtggaactggacccggcaggctatgtgaaagcagacgaaaccggagaaaccagtctggcaggactgtatgtggccggagatgtcagaacaaagaaactgcgccaggtagtgacagcggtttccgacggagccaacgcagcaacagcggtggctgaatatttgaaataaaaagtaacgttccgcaggatgatcctagagcgtgtctgaaaaatcatttccacaaactgagactcgcagctcacgaaaagcctttttcagacacgctctagaggacgcgttactgtgagagaggaataagcgtatgagttttaatacagaccttctccatgcaggagtggttcgggaggcaaacggagcaacccttcccccggtctatcaaagcagtgcgttcgaacaggacacagccgcagatctggaaaaaatatttgaaaataaagctcccggctactgttacacccgtgtagggaacccgacagtaaccgcatttgaaaacagaatcacaaaactcgaaggcggcatggcttcgatcgcctgtgcttccggtatggcggcgatcatgaacgccattttaaatattgtgcgaagcggggacgagattgtctcttctgcaagtctttacggaggatccatcgatctgtttcgtgatatcgaggaatttggtatcaaaacccggtatgtaaaaaacaatgactgggaagcgatcgagggagctatcaacgaacatactcgcctgctttttgcagagacgatcggcaatccctgtctggatgtgaccgatgtggaaagactggcagaaattgcacatgcgcataagattccactgatcctggacaacacgacagcaacagcgtaccttttccagggactaaaacatggtgcagatatcgtggtcaattcttcttccaaatacatcaacggaagcagcaattcgatcagcggtatccttacttacagtggaagatttcaatgggattccgagatgtatcctcagattgcagattacaaaaaatttggcccgatggcttatattgcaagactccgaaacagccttttccgtgacaccggcgcgtgtctggcaccgatgaacgcgtatctgaatctgattgggatggagacattgggactgcggatggaacggcagtgcagcaatgcgctggaacttgcacagtggctggaagagacgtatccgtctgttactgtcaactatccgggactgaaaagtagcaactggtatgagatctctgaaaaacagttttccagaggatatggagcaatcctgacgctgcgggtgggaagtaaggaaaatgcatttgcattgattgatgcactgaaaatcccatacacactttccaatatcggggatacgaagacactggtgatccatccgggatccacgatcagtcttcacagttcagaacaggaaaaagaagatgcaggtgttttcgaagatctgatccgggtgagtgtgggaatcgaagatatcgaagatctgaaagcagattttgcacaggcgatcgaaaagatcggacagcggtaaggtaaaggagagagaacgatggcacagaaagtagattacgcagccttaaaaaagggcggttatatgagacaaaaacagaaaggttacggttccctgcgactggcagtgatcggtggtaatctgacagcagaaaatatcaaaaaagtggcggaagtagcagaaaaatacggccgcggctatgtacatatgacatcccgtcagggaatcgagattccgtttatcaaagtggaagaacttgccgaggtaaaagaagaactggcaaaaggcggtgtgggaaccggcgtgtgcggcccacgtgtccgtaccatcacagcctgccagggatcggaagtttgtcccagcggatgtatcgacacctacacactggcaaaagaactggatgccagatatttcggacgggaacttccgcataagttcaaattcggtgttaccggatgtcagaataactgtctgaaagccgaagaaaatgatgtgggaatcaaaggtggtatgaacatcgcatacaaagaagacgactgtatctcctgtggtgtatgtgtgaaagcctgtcgccaggaagcactgaaaatggtagacggtaaagtagagctggatgcagagaaatgtaatcactgcggtcgctgtgtcaagagctgccctgtggatgcatgggagggaactccgggatatattgtatcttttggcggaactttcggaaataacatctacaaaggagaagaactgcttccgctgatcccggacaaggaaaccctgtttcgtgtgaccgatgcggcgatcactttctttgagaaaaatgcaaatccaagcgaacgttttcgtaagacgttgcagcgtgtgggagaggaagatttccacaagcagttgaaagaagcgtacgagggacagtgaaaggagaaccatcatggctgaattagattttgaagtaaccgatgaggttgatattaccgataaagtatgccccctgacattcgtaaaggcaaaagttgccatcgaagaactggaggatggagaggtcctggctgtccgcatgaacgacggggaaccggtacagaatgttccgcgaagcatgaaagaagaaggacataaagtactgaaattaaccgacaatgaagacggcacttacaccatgtatgtaagaaaggtggaagaataatggcagtacgggtaagcaaaacagattttgaagagaaagtattgaacgaatcgcttccggttctggtggatttttattccgattcctgtgtggcgtgcaaaaaactggcgccggttttaggaaatgcggaagatgattatgaagataaggtcaaagtatataaggtaaatacaaactttgatgtggaactggctgagcagtatgaagtgcagtctaatccgaccctgatcctctttaaagacggacaggtgaaagaccggaaagtgggtgcgctgagacaggcagatttaaacagctggatcgaagaacagatctgaagagagtatagagagacataaaggagaaaagatatggttatcacagtagcaggagagaaaaaagaagtaaaagacggactgacactgccggagctgatcgagcaggaaaatgtagagatgccggaatatgtaaccgtttctatcaatgaagaatttattgcaaccgaggataaagagtctaccgtgttaaaagagggagacaatgtagagttcctgtacttcatgggaggtggatgctaaatggcaatgacagatgaacagatcgagcgttattctcgccacatcatcttaaaagaagttggagccaagggacagaagaagctcctgaagggcaaagtcctgatcatcggagccggtggtcttggtgcaccggcagccatgtatctggcagcagccggcgtgggaaccatcggtatcgtggatgcagacgaggtggatctttccaatctgcaaagacagattatccacagtaccgcagatatcggaaaagcaaaggtaaaatcagcgaaagagactatgaacgccatgaatccggatatagaggttaaaacttaccggatgttcgtggatgcatccaatatccgggaactgatccgggagtatgattttatcattgatggaacggataattttccggcaaaatttctgattaacgatgcctgtgtcctggagaaaaaaccattttctcatgcaggaatcatccgtttcaaaggtcagctgatgacttatgtaccggggcagggaccgtgttaccgttgtgtattcaagaatccgccgccaaaagatgccgttccgacctgtaaacaggcaggtgttatcggagcgatgggtggtgtcatcggatctttacaggcgatggaagcgatcaaatatctgatcggagtaggtgatcttctgacaggatatcttctgacgtttgatgcgttgacgatggagttccacaagatcaaactgccgaaagatacacataagtgcccggtatgcggagacaacccgacgattctggagccgatcgattacgagcaggaagtctgcgaggagacagcagggcggtttgcgacgagagacgagcagtaatgaagaatatcaatatcagctttccggagtgtctggtgtttccgggcagaagcagaggaaacagaaaaggcagaatgggaagaggagacagttatggcgattataagaatgagagatcatctctatgatgagattgtaaattatgcaaaggaacatcttccggaggaagcctgcgggcttctcgccggggtggaaacagaagagggaagagagatccagaaggtgtattttctggaaaataaggatcatgcggaagatcactttacgctggatccgagagatcagatgaatgcaatcaaagatatgcgcgccaatgggttaaaaccgctgggaaactggcattctcatccgtcttctccgtcacgaccgtcggtggaggatatccggctggcgtttgattcgaaggccagttatctgattttgtcgttgatggcggagtatccggtgttgaacagttttcatgtggaaagcggagtctgggaaaaagaggatctgaggatttattcggaggagtattttttctgaggcttgcggatactttatatgtaactgttcagtagccactgtaccgcgaggtgttttggcatgaatatgccaaaatcccgagacatacaagccaaaatgctatcaccgaaggtgattttacatgcattttggcatgtaactgtgaaggtactgaacagttacgtttatataagattaatgctaagaagagaagtgcgaagtgtatcgtttgaaagtaagcggtatggttcgtactttttttacgcgagcaacgagccaaagtccatgcttgcatgagaccttggcgactgccgcgataacttgagaaactcgcaaagcgtgtttctcatagttgtggtttgctgtgtttggattctttcttgtaaaggggttgggggcgtgatattatagcatatgaataataaatagttaagggttttaatatagggaaaatacggattatgaattatagagtggtacggatagaggaagatgtagagtttggctgcgaggagcggaaagagggagatccggtgatggcagtggttcggctggaggacgaggacggggatgtaaaaatcgttcggcagagggatcagatgttgtatgacagagatattaatgaaggggatcgggtttggtttgatgaaaggcaggagttggtaaagtgagatattgcctgcatggacgaaagactggctgcacagacgaaagcccgcactgacccggtaaggccagacaaccgctggcaacgccaagctgagctaagtcctaagaagaactattatgccagttcgtggagagccgctcactgtcaagttcttctaaggactggatctcatcctggctaagagcgccagcaaaaggctgtctggccttaccgggtcagtgtgggctttctgggtgttggcggcgggaaggtgagatgaaacgatttcctgtatctttgagccgttctttgtgataaagtgggaccaggaatctgatgtgaaatcagtagaaaatcaacggaatccgaagaaaaatcagcgaattcaaaaaattaaaaatcggattttagtgtaggaaaggaaaagtaaaataatatatggatatgtatgaagtgttgaaacgatatttcgggtatgacgggttccggaacgggcaggaggatctgatcggggcgatcttatccgggagggatgttctggggattatgcctacgggggcggggaagtcgatttgttatcaggttccggcgttgcttttgccggggattacggttgtgatttctccgttgatttctttaatgaaggatcaggtgcgggcgttgaatgaggccgggattcatgcggcgtatattaacagttcgcttacggaaggtcagatttataaggcgatggaatatgcggtgcaggggcggtataagattatttatgtggcaccggaacggttgctgacgccgctgtttcttgattttgcacagagggtgcagatcagtatggtgacggtggatgaggcacactgtatttcccagtggggacaggatttccggccgagttatctgaatattgtggagtttgtgaatcagctggcggtgcggccggtggtgagtgcgtttacggcgacggcaacggagcaggtgcgggacgatattttgtgtgtgctggggcttcggagtccgaaggtgctggtgacggggtttgaccgggcgaatctttattttgaggtgaggacagggaataagaaggcggagctgctggattatgtgaaggaacaccggacggagagcgggattgtttactgtgcgaccagaaagaatgtggaagagatatgcacgatgttacagatggaagatataccggcgaccagatatcatgcggggctttctgcggaagagagaaagcgcaatcaggatctttttatttttgatgaaaagccggtgatggtggcgacgaatgcatttggtatggggatcgataagtcaaatgtccggtatgtggtacattataatatgccgcagagcatggaaaattactatcaggaagcgggacgagccgggcgtgacggggagcgggcagaatgtatcttgctgtattccccacaggatgtccggatcaatcagtttttgttagaggaaaaggatctgcgggaggatatggacagggaagaggcggaagcagtccgggagcgggatgccgagcgtctgcggatgatgacgttttacagcacgacaaaggactgtctgcgtggttttatcctgaaatatttcggtgagaaaggtccgaggcggtgcgaaaactgttcgaactgcctccatgagtatgtggaggaggatgtgacggagatttgccgggatattatggaatgtatcacggaactgccgagaaattacggtgcaggaacgatcgccgcggttctccggggaagtcagaatgcgaaagtaaaatcgtatgggctggaagctgtggaaagttatggaaaacagaaacagactaccgagccgcgcctgaaggagattatcggggaacttctggcacaggggtatctgtgggcgacaccggacaaatatgcgctgattcatctggaagaaaagggcgaggattttctggaggaggatgagaagatcgtgatgaaattctcaaaaccaaaggagaaaaagacgaaaacagatggcagcgggaaaaagatccggaaacgcgccgggcttacggaagatctggatgctgcctcctggcagttatttgagcggctgcgtcagcttcgcctcacgatcgccggagaacagaaagtgccgccgtatatcgtattcagtgataaaacgttgattgatatgtgcgtgaaaaaacccaccgaccgggcttccatgctggaggtgtccggcgtgggtgaggcgaagtatgagaaatatggggaacggttcttagaggaactcgctaaaaagtagtaaaataccagttgccatttttgctgtattatgcggcggattgttccttgaaaaatcgaatagcacatgataaattataaatgtgacataaaaaaagtcatatttataaaaaggtgattgatatgaaagaattcttggaaaaatcattacgacaaaatgtaagaatgacggagaataaagagatatataaaaagctgccattagcatatcgtggaagatatgatatctttacagtggagacgaatggtgtattatggatggctattcagcctagagatgatgttggacttgtcctgttgcggagagacagaacttgcgtggaaaaaatgacagggttaaactgtgcaatatttcttgaacgaacgacattctatataaaagaaaagttgatggaagagggaatcccttttgtaatagagggaaaacaggtatttcttccgtttattggatatttgtcgagtaagtcaaatgaaagagaattatccccagttcatttgatttcatttctgacgcaaaaaatgcttctgttggctatttatgaacgatggatggaagtgaaagtatctgatgcggcgaaacgaatgggagtgtcaacaaaatctgcaagccggtgctttgatgagttagaatatttaaatattggcgtgttagatatgaaaggtaaatcaagagtcatcaatatcccggatgatcgaaaacaattatggcagcagattgagagtgtattaagaaatccggtgattcgaagatttgttctaagaaaagatatgaaactagaaaagaaagcaggtatttctgctttgtgtgagtattctcttttgtccgataatgcttatcctacttatgcagtaacgaagaaagagttgaaagctagtggggtgaaagtggaaaaacaagctagtgaattggaagaaattggctgtgttgtttttgaactgggatattttatagattttctgggaaaaggattgcaggatccctttagtgtggtactgtcgcagacaagagaggaacaggaagaggaacgaattgatatttcaattaataaaatgttggaggaatatgtatggtcaaaggattagatacatttcggagatactttgcagattatgaagaacagtatgttttaataggtggtgcagcctgcgatattttatttgagagtaatgaagtaaatttcagagctacaagggatctggatatggttttaatcgttgaagcattgactccggagtttggagagaaattttggaagttcatagtggatggaagatacagaaataaagcaacaaacggtgtcaatcctcaattttatagatttgataaaccagaagacgataaatttcccaaaatgattgaattgttttgcagaagtgattttgaacttaaaaatgcagaaggaattaccccggttcatattgatgatgaggtatccagtttatcagcaattcttttgaatgatgattactatgaggcacttcttaatggaaaagttataagaaatggactttctgttctaagaccggaatatatcattctttttaaagcaaaagcatatctcgatttaaaaatgcggaaagactcaggtgaaaaagttgattccagtgatgttaagaaacataaaaaagatattttgcgcattgcttcggaacttatgcttgaaaaagtagaagaattgccgatagcagtagatgctgatatacatagctttattgaccaattggaacaggagccatttgatcaaaattcattgaagagatatggtttgaaaaatgaggatattatggaattgttaaagaaagtgttcggataaaatgtggtgtggaaatgcaatctcaatcatgaaaaactaagcaatgcgagggtgtgcaacaatgataaaactttctataaagtatccctttttatataacttatctatttgcccttcataagataggtgtgatttcacttcattcaaaaaatatctccgtataaaaaatgtctcccctggggcacatcgttgagaggtgtggggagtcctgttggtattattgtatttacttacgtccctgcgccttcaacggaagcgtcacagtgatcagcagagagtgttcatcctgcgtggttgctgtgatttttcctttatgggtattgaccacggcagcggcaatggagagtccgagaccgtagccaccggtccgggagcttcttgacttatctgtccggtaaaaacggtcgaacaggtgtggcagctgttcacggttgatggagtcggcggtgttgtatacagaaagtttcacgttgtttcctgctttttcaagacgaagggaaatctcgcctttcggagtggagtatttcatcgcgttatctaacagaattgataccagctgtgtgagtgatttttcgtctccgtacagggagatcatcggctgaatcaaagtttcaaaagtcttgttctgtgtgcgggcaagtgcctgaaaagactgtaccgtttcttctaccacatccgagaatgggaaatcgatcatttgcagccgggtgcgttcctcttccatccgggagagtgtaatcaggttattggtcagggaagtcaggtgttttgtctgctcctgaatatctgccagccagagcccgggacagggatttttcatcttctgctatcagtaatcgcataaaacatacacctccggttatggataacatatatttttctgaactcagtatggcaaaaaaaggagaaaaatcaaatgaaaatactgtgtgcagggtcagagaaattctgtagctgctgtgaatggagtgaccgcaacatcctgtaacaacaggttgaccatacagaaagaatacattatacttgcagatagaggaaaaaggaaggaacgacacttatgaattatattgtctttgatctggagtggaatcagtgtccttacggaaaaggccaggaaaatgaaagaattccctttgagattattgagatcggagcagtaaaactgaacagtgagcgacagatcatagaccagtatcaggtactgatacagccgcgggtatataagaaacttcatcaccgtaccagagagatcatccagatggatatgaaactgttggaacgggaagggattcctttttaccgtgctgtcaaagaattcttgaaatggtgcagtgaggatgccattttttgcagctggggcaattccgatctgctggaactgcagcgaaacatgaaatactacggcatcctgcagcttttaaaaggaccgatccgttatctggatgtgcaaaaattattcagtatcgaccgggaggacggagacagcagaaggtctctggaatatgccgtggatgtactggagatagaaaaacagcaggaattccaccgggcactggcggattcctggtatacggcaaaggttttgatgcggctccgaagcgagattgtggacacgttttattccattgactgctatcagaatccgaaacgaaaggaagaagagatcaaagtcttttatccggggtatgaaaaatttatttcccgggaatttgactccaaagaagaagccatggcggataaggagatcaccagcagccgctgtcatctgtgcagaaaaaatatccgcaaaaagatccggtggtttgcggcggggcagaagaattattactgcctggcgtactgtccggtacatggctggatgaagggcaagatccggatgaagaagacggagcagggcagagtctttgcggtaaagaccatgaaatataccacggaagaggaagccatggagatacggaccaaaaaagaagaaatcaaaagaaaaagacgggcccgtaagaaaggagaaaaataatatgttggtacagggaattcatcatgtatgtatccgatgcgaaaaatcggagattgaaaaagtaaaagaattttatcagggagtgctgggtatgcctgtgatccgttcctggggagaaccggaactggcaggtttcatgtttgatacaggcgcaggacttgtggaagtatttaccgatgccgagggacagctgccccagggaagcatccggcattttgcattgaagacggatgatgtggatggatgcgtgaaggcagtccgtgaggcaggatatccgatcaccgtagagccaaaagacatcgtgattccgtcccaaccggcatttccggttcgtgtggcgttctgcaacggaccggtgggagaagagatcgagttctttcaggaaaaataaaacataatacaattaaagataataaaaatagtttacataacattaagaatgaaaattctcggacagaagagaaacctgaaaaaggaagatctgtccgggaatttttttgcagaaaagtacttctatgtaaagaaaaaatgcgtcatggcagatgcggatatctgccggggtgatttatggctagtaaaaaagtgaaataagattctatttgtgcgaagtctgtgcaaattactacaaaaacctcgacaattcaaccgtataatgttataatgatacaaccgtttaaagcgttgaagcgagaaagtgaagaaagaagtagaaagtatgaaaatcgtagtatgtatgaaacaggtaccggccagttccaaagtagatattgacccggaaaccggtgccatgaaaagaatgtccggggagaccaggacgaatccgtacgatctgtttgcgctggagacagcccttcagatccgtgaaaaagtgggaggaaccgtaacggtactgacgatgggaccgccgcaggcagaggaaatgatgcgcgatgcttatacgatgggtgctgacgatgcggtgatactctctgacagaaaatttgcaggagccgatgtgcttgccacctcttatgcgctggcacaggggatccaggtgatcggcggcgcggacctgatcatctgcggaagacagacaaccgatggcgataccgcacaggtaggaccggcgatcgcagaacatctgacgattccgcatgctgcatgggtggcagagatcgtggatgtgaatgagaaagccgttcaggtccgtcaggatctggtcagtgtatctcagatatccgagataccgtatccgtgtcttctgacaatcgacaaagatacctgtgtaccgcgtctgccgtcctatctgctaaaaaaagcaaccgcagaccgtccgatccgtatcctgagctttgagaatatgccggatcaggatctgagccgatatggtctggtaggatctcctacctctgtagagcgtatgtttgcaccgccggaaggagaaaaacaggtctatctggaaggcagtgcaaaagaaaaagcagaggaacttttttccatcttaaccggaaagaagatcatataggaggaacagatacatatggaatttatgaaatttgatgcagacaaatgcagtctctgcggaatctgcgtggaaaaatgtccttttggtgcgctgaccatagagggagcgggaatcgtagtcagcaaaagctgccgtatgtgtggtctctgtgtgagaaactgtccggagaaggccatacagtttgagcagaaagcaaaagcatttaacaaagatgactggaaaaacttcctgatctatgtggaacaggagcgtggcgagatccatccggtgacctacgaacttgtgggagaagccagaaagatggcaggaaaagtcggttacgaagtcaactgcgtgatcgtaggcggcgaaggaacgaaggaaaatgccgagaagctacttccttatggtgtggaccatgtgtatgtatatgaagatccgggatttgaaggatttcgggcagactgctatgcagatgcagtggcagactgtatcgcggcaaataaaccgagttctgtactgatcggggcaaccgcactgggacgttccctggcaccgcggctttcgacccgtttccataccggtctgaccgcagactgtacgacactggatatcaaaccgaataccgatatgatccaggtacgtcctgcatttggtggcaatatcatggcacagatcggaatcacaaagtccagaccacagtttgcgacggtgagatataaagtcatggataaagctgaagtggtagcgaacccgcacggcgaagtggttgtctgtccggtcaatgaaaagatggcagaatcgagaatcaagatcctttcttctgaggtgatcgataaagtcaagagcctggaagaagaggatgtgctggtggtagcaggccgtggtgtacgaaatgaaaaagatgtggaaatgtgccgggaactggcagaagcccttggcggtcagctggcctttacccgtccgatggtggaaaacggatttggcgatacggcgcatcagatcggtctgtccggccgtaccgtgcggccgaaactgatcatcaccagcggggtgtccggagcgatccagttcacctcctgtatgaacggatcggaatgtatcgtagcgatcaacacagatccgaacgcacagattttcagtgtggcagattactgtatcgtagatgatttataccaggttgtcccggaactgacagcattggcaaaaaaacagaaggaggactaagtcatggcatacccttataagaaaatgacttcccaggattgtgactatatccgttctgtcaccgcgcctgaccgtgtatgggtgggagcggagatcgccagcgaatattatcgggatgagatgccggagtacggcgtgtatcagccggatctgtacgtggaagttgtgaacaaagaagaagtatcagccattatggcatatgcgtataaagaaaatatcccggtggtctgccgtggagcgggaaccggcctggcaggaggagctacctgcaaatacggcggtatcatgttatctgtcatgcggatgaacaagattttcccgattgaccggaagaatcagacgatcactgcccagccgggtgcgctgttgattgatattcaggcggcagccgcagcaggcggactgttctacccgccggatccgggggaaaagactgcatccatcggcggtaatgtcattacaaatgccggcggtatgaaagcggtccgttacggactgacgagagattttgtccgctgtatcgaggcagttatgccggacggatcgatcatgaatttttcatccaatgttgtgaaaaatacgaccggatatgatgtgaaagacctgatcatcggttccgagggaaccctttgtatcctgacggaagtgacattaaaactgcttccggcaccgacctgcacctgtacgctggttatgccgtttaagagtcttgaagagtgtgcggacatggttccgaaggtactggaactgccgtttgtaccgactgcgatagaattccttgagcgagaattgatagacattgtagagcggaacctgaacaaaatgtttccggtgaaagagggtgaggcagttctgatcgtaatgtacgatgcttcgagtaagcaggaacttgacagtgccgtggaagctgctgcagaggcagcactggcaaacggagctttggactgtgcgatcgccggaacaccggaacgtgccggagcggtatggagtgtgcgcggcggtatcctggaaggcatgaaagcggattctgtggcacaggaagagtgtgatgtggttgtcccgagagcaagaatcgcagagtatgtaaaggcagcgaaaaagatcgcaagtgctcatggcatccgtgtagagccctgtggtcactgtggagacggaaacatccacaccgagatgcttcgaggaccggagatgagtgatgaagagtggaaggcagcaacccacgccagtctgacagaactgtacgcactgtccaaagaattgggtggacagttatccggagagcatggtatcggaaacggccgtctggaattcctggaagagttcgtgggaccgcggatgatccagctgtacaaatccatcaagctggcgtttgatgataaactgattctcaatccgggtaaggtgatcgagtttaataaataatcagaaatattccgacaataaaggaaatcgggggaaagaaagtatgagtgagaaaaaatcattactggttgataaaagtaagatgcctctggcgatgggacttgcgttcgtggcatttaccacacagtttggcggaggattcgcatccggcgcacagatctatcagtactttattaattacggtatctggtgtctgatcctgccactggccacacagggcttatatgcactgtttttctggtatggcatgcgttatgcatacaaacacaaaacatacgactacagaagtttttcagacagcatgtatggtaagacccgccacgtgatgtccaacctgtatgaaatctgttacctgatcatgatcggtaccgcatccgctgcagcatttgcaaccggaggttctaccttacagacactgtttggtatcccatattgggtatgtacactgatcatcgcagcatttatcttcttcattgctctgtatggaaccaatgtagtaagaaaatgtgcttctactctgagtgtgctgatcatcatcggtctggtactggtactggttccgaatatcatcgcacagtggggtgatatcacagcctccatcgggcgcatgacttccggagagatgccggtgatctcgtctgagaccggtgcattcggcccggcactgtggtccgcagtcctgtatttcttcttccagctggcatcggtatctgttatgtaccagcatatggaagatgttaccgatgtaaaacagatcaacaaagcagccatctggatgttcatctgcaacttcctggccatggaactttccatcttcggtctgcttgcgattgcttacgtagcagatctggccaccgcatccgttccgatgctggttctggtgcaaaatggcgtaggttccggtatcctgaccccgatcatctcgatcctgatcatcctcggcgctatctccacagccgtaaacatgatctccggtattgtaacccgttgcgttaacgcgatggaacgccgcatggacagcaaagagaaaaaagcaaaaggccatctggcaagaaatgcagtcttcactgcaatctttaccttcctggctttcgcgatcgcacagttcggtctgatgacagttgtcaagaaaggatatgcttaccttggttatgcagcactgatcacactgtttatcccgtttgtggtacatgcgatcggaacgaaagggaaagagatttaatcggagtgtaaaatacgaaaaaagagatttgtcgttctatgatagatagataaaggaaaacataccgaatgcaatgatttcaaagatccttggcgtaaatcaggtaacgattgaaaaatagattgcagaagaaaagtggataagaaataattattggtatacgatgcaaagaaacaggcagatatgattttatgaattcatatctgcctgtttctttattttacggttttcttttttgttgtttttttcttcttccgtctcttctttttcttcactgccagcacaatctccataataataatcagcagcagcataccgcccagtacggagtagtaccatggaaccgctgtaaatacagagatgattatcgtgcccacaggagcgacaaatgcgagtactttctgaaaaataccggaagctgtttcttttgcagaatttccaagatcagatgcagcagcgctgccagactttttgcagatgtttgtgggttcactgtgtaacagtgcctggatcgcagtgtccgggatggattcgtagcctaccggatactggttgtatgtatagctgcggcagagggttccgtctcccgggttgcaggttgtttctacggaggacagatccatgccggccggcagcgttaccgcgcaggtcgggcggagatttgcaactgtctcgggctgtccgaagtacagcgacgggtacagcatctttgcatctgcccaggttttccggttgaagatggaataattctggaaattattgaatccataatctaacagcgaagccgtatctgtatagatctgtcgtccattcgttcggagtgatacacatacaagccgtctgccattccgctcggcgtaagtgaccagcgtgtttaacgccgcctgggtgaatccggtcttgccgccggtacatccctcatacgtataatccctgtccggaagcatcttatgatggttgctcagccatcgctcttccccacacttgttggtctttccgatgcagtaggtagtcgtctggcagaccttgcggaacgttgcattgttgtatgccgcctgtgcgatcagtgccatatcatgtgccgtcgtataatgattctcgtccggaagcccgttcgggttggtaaaatgcgtgttcgtgcagcccagggaagctgctttctggttcatcagttccacgaatgcatccacactgccgctgatatgttccgccacggcgacacagacttcattggcagattcgagcatcatgccgtacagacagtcttccatagtcaggttttccccaagccggattccgatattggaacttccctgttcgatgccgtagacagcattttccgaaaaagtgactttttcggacggacgggaatgttcgatcgcgatcagtgtggtgagaatcttagtgatactggccggatactttgcgacatccatgtttttggaatacaggaaagtcccgctgtccagatccatgacaacggctgattctgcccatacggcaggtccctgtggccagttggcggtgtcgttggactggattggctcaaagtaggcatccggttcgattcgttccggttccgtcgtttcgccttcggtctgaccttctgccgcttctttggtgtctgcggatggatttcccgtgtcctgagaaaccgtggtatctgctgccggttgctcaacagtaacttctgcagcatcaaccgcagaagaagacagactggacaggcccagcaaaatagacgccgagagcgcgagaaggcgatgacggtatcttcgattgttcataaaaaactcctctgatttccatttttgcattataaaatacagggtctgcagaccctgatttcaactattataccacagccattgacaaaatacgacaaaaaacctggaatccgtcggattgtaagaaatgggtacagtacacagtaacagaaaatgtatctgaacgggacttgcaaaacagtggcagagtgttatatagtggatataaaatatatggttggatcagaagcagtaagatatttaagaataacattatgtaaacttatagagaataaaaccaatactacaaagacgcaataaggagaagaacgatgacaaaagagcagttaatcgctttattaaacgatatgtcactggaagaaaaggtgaatcagatgagccaggtgatcggtggtttttttgatgatgatacggtgatcacaggaccgatggcagagatgggatttaccgaagaaaatatcgaactgtccggttcagtgatcggatcgatgggtgcggagacagtcaaaaaaatccagaaatcctacatggaaaaacatccgcatcatatcccactgttattcatgctggacatcatcaatggctacaaaaccgtatttccgattccgctgggacagggagcaacctttgagccggagctttcagaaaaatgcgctgcggtcgcaacaaaagaggcatccgtcagtggtctgcatgtgacattcgccccgatgactgatctggtgcgtgatgccagatggggacgggtgatggaatccaccggtgaggatccgtatctgaacggactcttctgtgagagtatggtaaaaggttttcagggggaaaacctgagtgatgagtataagatcgcagcctgtgtgaaacattttgcagggtatggagcaccgacagcaggaagagactataatacagtagaattatccgaacatactttccgggaattttatctgccttcttacaaagccggaattgatgccggagcagcgctggttatgacatcttttaatacagtaaacggaattccggccactggtaataaaaaactgatgcggggtattcttcgcgatgagatgggatttgacggagtgctgatctcagactgggcagcgattgaggaaaccatttatcatggttattgtgcagataaagaagacgctgcgatcagggcggtagaagcaggcgtggacatcgatatgatgacaggaatctactgcgataacctgtgccgtctggtgagagaaggaaagatcccggaatctctggtggatgaatgctgtatgcgtatcctggaactgaaaaacaagttggggctatttgagaatccatataaagatgctgatgaggagaaagaacagcagctgatcctgtgcaaagagcaccgggaactggccagagaggcagcaagaaagtcatttgttcttctgaaaaacgaagaacagatcctgccgctggacaaaacgaaaaagacggcatttatcggaccttatgtaaacagcagaaatctgatggggtcctggtcgatcatcggggaagcaaaggatattacgacagtagaagaaatcatggcagtggaagaagcaggaaacaatgtggtatgttgtcagggttccccgatgttgggagcagaggtgatactggaaggatttacagaggagaaccaggcaacatatacaccggaggaagaagcgaagatgctggaagaagctctggaagcggcgaagaaggcagatcaggtggttctgttcatcggagaagaccgtctgcagtccggagaggcaaccagcaatgccactattcagatcccgcagattcagcagaaccttctggagcgggtagcagagattaatgaaaatatcgctgtggttctgttttccggtcgtcctttggatcttcgtgacgttcaggtaaaggcaaaagctattttagaggtatggatgccaggtacagaaggtgcaggagcgattacagacgttctgtatggtcgttacaatccgaccggaaaactgccaatgagctttccgtactgtgtgggacaggttccggttcattataacgaatatgccaccggccgtccccatgtggaaggcaaagacaaggatcgtttccgttccaaatatctggacatcccgaacgcaccgctgtatccgttcggctacgggctgagctatacgacatttactgtttcggaagtttctctgaacaaagacagcatgaaagacggagaaagcatccgggcagcggtaaccgtaaaaaatacaggcacctgtgccggaaccgaaaccatccagctgtatctccatgacgttgccgcaagcgtggtacgaccggttaaagaactgaaagatttccggaaagttaccctgcagccggaagaagaggcaagagtggaatttaccattacggaaccacagctttgtttcctgagtgaaaataatatttttgagagtgaagcaggtattttcgaaatttttatcggtacggacagtacaacaacaaataaagcgaaatttacccttgaaaaacagtaaaattccttgacaaccgctttggcaggtatatataatgagggttagtaaaaacgaagacggagacagtagtctgtgcctgaaagcctcagcgagccgggggaggtggaagcccggtgccggtcggtcagatgaacatcactcctgagttgcactctgaaacctgcgggcagtaggagatgccggttgatccgccgttaaagggaaggtgtatcggtgaagagcccgtacattgtaagaggtggtataacgatggtaatgtagccttcgtcctgttacagggacgaaggctttttgaatttacaggaagaagtataacaaaccgcttttgaaaataataaaggaggattctgagatgtatcagaaagtgtcaaccaatctgaactttgtggacagagagaaaaagacagaacagttctggaaggaaaatcatatttttgaaaaaagtatggaacagagaaaacagggggaaacctacacattttatgacggaccgccgacagcaaacggaaaaccgcatatcggtcacgtactgacccgtgtcatcaaggatatgatcccacgttaccgtaccatgaaaggatacatggtaccgagaaaagccggctgggatacccatggtcttccggtagagctggaagtagaaaagaaactggggctggacggaaaagaacagatcgaagaatatggtatggaaccatttatccagcagtgcaaagaaagtgtctggaaatacaaaggcatgtgggaagatttttcttctacggtaggtttctgggctgatatggagcatccatatgtaacttatgatgataattttatcgagtctgagtggtgggcactgaaacagatctgggacaaaggtctgttatataaaggattcaagatcgtaccttactgtccgcgctgtggaacaccgctttccgcacaggaagtatctcagggatacaaaaccgtaaaagaacgctccgcgatcgttcgctttaaagtgatcggcgaagatgcttatttcctggcatggaccacaactccgtggacactgccttccaacgtggcactgtgtgtgaacccggatgagacttactgtaaagtaaaggcagctgacggatacacctattacatggcagaagccttgttggacaaagtgcttggcaaactgggagacgaagagaaaccggcttacgaagttcttgagaaatatacaggaaaagatctggaatacaaagaatacgaaccgctgtatgcatgcgcaggcgaagcagcagcaaaacagaaaaagaaagcacattttgttacctgtgatacttacgtaaccatgagcgatggtaccggtatcgttcatattgcaccggctttcggtgaagacgacagccgtatcggacgcaactataatctgccgttcgtacagtttgtagatggaaaaggtcatctgaccaaagaaactccgtatgcagatatctttgtaaaagatgctgatccgaaagttctggtggatctggacaaagaaggaaaactcttcgaagcaccgaaattcgagcatgaatatccacactgctggcgttgtgatacaccactgatctattatgcaagagaatcctggtttatcaagatgacagcggtaaaagatgatctgatccgtaacaacaataccatcaactggatcccggaaagcatcggtaaaggtcgtttcggcgactggctggagaatgtgcaggactggggtatttccagaaaccgttactggggaactcctctgaatatctgggaatgtgagtgcggatgccagcattctgtgggaagcagagaagaactgtatgagatgagcggtgacgagcgtgcaaaaaccgtagaactccatcgtccgtacatcgatgacatcaccatcaaatgcccggaatgcggaaaaccgatgcacagagtaccggaagttatcgactgctggttcgactcaggagcaatgccatttgcacagcatcattatccatttgaaaataaagaactttttgaacagcagttcccggcacagtttatctcagaagcagtagaccagacccgtggatggttctactctctgctggcggaatccaccctgttattcaacaaggctccgtaccagaacgttatcgtactgggtcatgtacaggatgaaaatggtcagaagatgagtaagtccaaaggaaatgcggtagatccgttcgatgcactgcagacatacggggcagatgcgatccgctggtacttctatatcaacagtgcaccgtggctgccgaaccgtttccatggaaaagcggtacaggaaggtcagagaaaattcatgagtactctgtggaatacctatgcgttctttgtactctatgcaaatatcgatgagttcgatgcaacaaaatacaccctggattatgataagttgtccgttatggacaaatggctgctgtccaaactgaataccgtgatccagaccgtagacgacaacctgaacaactaccggatcccggaagctgcaagagcactgcaggaattcgtagatgatatgagtaactggtatgtaagacgaagccgtgaacgtttctgggcgaaaggaatggaacaggataagatcaatgcctatatgacactgtacacttctctggtaaccatctccaaagttgctgctccgatgattccgttcatgaccgaagatatctaccagaacctggtaagaagcatcgataaagatgctccggaaagtatccatctgtgtgacttcccggttgccaacaaagaatggatcgacaaagatctggaagcaaatatggaccacctgctgaatgtggttgttatgggccgtgcctgcagaaatactgcaaacatcaagaaccgtcagccgatcgcagccatgtatgtaaaagctccgtacggattgtccgaatactttaccgcaatcatcgcagacgagctgaatgtaaaagaagtaaaattcaccgataacatcgaaaactttatttcttacagcttcaaaccgcagctgaagaccgtaggaccgaaatacggaaaactgttaaacggtatccgtaaagcattaagcgaacttgacggaaacaaagccatgtctgagcttcgtgcaaacggcgagttaaaacttgacatcgacggtaatgaagttgtattatcagaaggggatttgctgatcgaaactgcacagatggaaggttatgtaaccgagtctgacaacgatatcgcagttgttctggataccaatctgactccggaactgatcgaagaaggtttcgtaagagagatcatcagcaagatccagaccatgcgaaaagaagctggctttgaagtaatggataagatccaggtgtatgtgaaagacaacaaagtaattgaagacattatgaaggcacatgcggaagagattcaggcagaggtattggcagagaagctgcttaccgatactgctcagggttatgtaaaatcctggaatatcaattcccaggaagtaacactgggagttgagaaaatgaattagttgtattgaaaattcagtacctttacaattagcaaattgtaacaaagtatgtggatcagggggcgggtacaaatgtatcagcccctttttcatgatacaggatctgtttgctttctgtatcattataaatatcattgcaaatgaggaggtttccaatgttagacagtcatttcaaaaaagaagagtttaaaaaagcggtcaaagaaaacgtaaagatgctttaccgtaagacaatcgatgaagcaacacaacagcagatcttccaggccgtttctctggctgtaaaagatgttattatcgataactggctggcaactcaaaaacagtatgagaaagatgatccgaagatcgtatattatctttccatggagtttctgatgggtcgtgccctgggtaataatctgatcaatctgactgcatataaagaagtaaaggaagcactggacgagctgggatttgatctgaacgtgatcgaagatcaggagccggatccggcactgggtaacggtggtctgggaagactggcagcatgtttcctggattccctggcaactctgggatactgtgcatatggctgtggtatccgttatcactatggtctgttcaaacagaaaatcgaagacggctatcagatagaagtaccggataactggctgaaagatggttatccattcgaactgcgtcgtccggaatatgcaaaagaagtaaaattcggcggatatgtacgcgtggaatatgatgcagctaccggaagaaatcagttcatccaggaaggttatcagtctgtaatggctattccttacgatatgccgatcgttggttacaataacaagatcgtcaacactctgagaatctgggatgcagaaccgatcactgatttccgtctggatctgtttgacaagggagaatatcataaagccgttgaacaggaaaacctggctaagaatatcgtagaggttctgtacccgaatgataaccattatgcaggtaaagagcttcgtctgaaacagcagtatttcttcatttctgcaagtatccaggaagcaatcgcaaaattcaaaaagaaccacgacgatctgcatgatctgccgaagaaagtaaccttccagctgaatgatacccatccgaccatgacggttgccgaactgatgcgtatcctgctggacgaagaaggaatgacctgggaagaagcatgggatatcacaacacatacctgtgcatacaccaaccataccatcatggcagaagctctggaaaaatggccgatcgagctgttctccaaactgcttcctcgtgtataccagatcatcgaagagatcaaccgcagatttatcctggagatccagaacaaatatccgggaaatcaggaaaagatccggaagatggctatcatctatgacggacaggtgaagatggcccacctggcaatcgccggcggttattctgtaaacggtgttgcaagactgcataccgagatcctggaaaaacaggagctgaaagatttctacgagatgtatcctgagaaattcaacaacaagacaaatggtatcacacagagacgtttcctgatgcatgcgaacccgttgctggctgactggatcaccgatcatatcggtgacggctggatcaccaatctgccggaactggcaaaactgaaagtttacgcggatgacaagaaagctttgcaggagttcatgaatatcaaatatcagaacaaagtacgtctggcaaaatacatccaggagcataacggaattgaagtcaatccgcactccatcttcgatgttcaggttaagagactgcatgagtacaaacgtcagctgatgaatattctgcacgttatgtatctgtacaacgagatcaaggcacatccggaaatggatttctatccaagaacattcatcttcggtgcaaaggcagctgctggatatcgccgtgcaaaactgaccattaaactgattaattccgttgcagatgtgatcaataacgatgcttctatcaatggtaaactgaaagttgtatttatcgaaaactaccgtgtatccaatgcggaactgattttcgcagcagcagatgtttccgaacagatatccactgcaagtaaagaggcatccggtaccggtaatatgaagttcatgctgaacggtgcaccgactctgggaaccatggatggtgcaaacgtggaaatcgtagaagaagttggtgcagagaatgcattcatcttcggtctgaccgctgatcaggttatcaactacgaaaacaacggcggatacgatccaatgcagtacttcaacaatgatccggatatccgtaacgtactgatgcagctgatcaatggaacttactccaacggagatttcaacatgttccatgagatctacgattctctgctgaacacaaactgcagtgatcgcgcagatacttactttatcctggcagacttcaagtcttatgcagaagcacagaagaaggtggaagctgcttacagagacagcgaaggatgggcgaagatggctcttctgaatactgccagtgcaggtaaattctcttctgacagaacgattcagcagtatgtggatgagatctggcatctggataaggttacgattgaagagtaattttatttagtaaatcatatgttgtaggacggacgcggccggatgaccgtttccggtccaggcaacgtgggcaggggaactttgaactagccgctaactccgactataatttgcttgggtcagctgacccaagcaaaagtctacgtaagcgtcggatttcaaagcttcccctaaacgcccacccagtgttgcctggaccggaaacggtcatccggccgctgtgcgttggcggggactgatttatcagatgttgggcatttttaaggggataaaattactcttttggggggagagagagataacatagaacggacgcaatcggctgatcgtttctaatcctggcaacgtgggcaggggaacgttgaactaatccctaactgcgactaagactctcgcgagagcgctcgagcctaagtctccgtaagggctggatttcaaagcttcccctaagcgcccacaaagtgttgcctggatcagaaacggtcagccgattgctgtgcgttggcaaatggaaaatctatacaattacgaccgcaaccttctccacaccacaatcgcagtcgaagaaaggcgccctcatggaaagctggcagcttgtcgagcacgagtttgagactacaggctcaaaccgagcgcagaccctgcctgctttccatgagggcgcctttcttcgacggacctttgtcgatcaggtaaaaacaggaacaacaaacttcctatcaaactttaaatctgtatccaaccccccagatcgtttcaatatactgcggttttgccgtattaaactcgatcttctcccggatcttcttaatatgcaccgtaaccgtagcaatatctcccacagactccatatcccagatttcccggaataactcatcctttgtaaacactctgttcggattctgtgccaggaaggtcagaagatcgaattccttggtggtaaaattcttttcctctccattcacccagactcttcgtgctgtcttatcaatcttgatcccgcggatctcaataatatcattttcctgtacacccgatccgatcagccgctcataccgcgccagatgcgcttttactcttgccaccagttcactgggactgaaaggttttgtcatgtaatcatctgctccgagtccaagtccccggatcttgtcaatgtcatctttcttggcagaaaccataatgatcggcgtgttcttctgtgcccggatctcccggcagatatcaaacccgttcatctccggcaacatcagatccaggatcaccagattaaaatcttctgtcagagaacgttttagtccgacatcaccccgatgctcgatctccacctcaaacccgctcagttccagataatccttttccagatctgcgattgcttcttcatcttcgataattaatattttactcatgtacaggtacctcctgatattttctcaaagccagatacatggtagtacctgtgccttctttacttgttgcccagacctggccgccgtgatcttccatgatctttttaacgatggaaagaccgataccgcttccgcccttagaagaatttctcgaagcatccgtgcggtagaaacgctcgaaaatatttgccagatccttctgtgcgattccttttccgttatcttcaatttcaatctgaataaaatctcctacatcccgcaaacggatattgatcacacctttcggtttgttcatatatttcagagaattgctgatgatattgttgatgacacgttttaactgctctgcatctgcaattaccaccgcatcttcttccagataattgaaatatgtcagcgatataccgcttgagtccagttctacgctcagttcatctacacagtcttcaaaatagtcactgatatgaatcttgttgaacgtatacgggatccggtttgtatcgatcttggaataaaaggtcagttcgttgatcagccggtccatttcatttgccttattatagatggtgcggatatatcgatccatcttctccggcgtgtctgccacgccgtccatgatgccttccacataacccttgacagctgtgatcggtgtcttcagatcatgggaaatattgctgatcagttccttattttccttgtcaaatgccactttttcttcagcagactccttcaggcgtttgcgcatttcctcgaaatcaccacatagatctccgatctcatccacacctgttttttcaattgtaaagtccagattgccttccttgatattttttgttgcttccttcagctgagtcagtggagtcattacgccgcgatatgtccaggtacaaagccccagggcagtgagaatcaggatcaggatgatcacaaacacagtatccagcaggatcttctttaactgaggaaccatggaattggaatggaaaataataaacgcacttcctttgacaccgtcagtaaaggtaaaatccacctgcttgataagggactgcacatcggcaccgatatagaccccacggtcattgtcggcagaaggatcgccgtattccggaagttcggaaaagagcagttcatcctgtgtcggggaaccacagtaaaacatatcgttacccttccggatcagcagataagcattttttccggtcagatcctgattcagtgaattcagataagaagtttcctccagtttttccggatccgaagaggctgttttctcgagagtggagaatgttttctgcgtcattttgctcaacagcatggtattgttggagagattttcataagtaaccccttcgattccatatttcttttccagtgaccagacctgatacatggtaaaaccggtaactgcaacaccggtcaggatcagaggaaccagaatgatcacaaaaaatgagataaccatacgatttttcagtttcatagtttcacctgttttctgttttgatatagacgggcagaagtacccataatgatatatcaagtatagcatatagcatgtgctttttcatctaaacaaagtgggataattctaaagattctgtaaaattatgagaaagcctcccgtgtttgccgtggaaaaacagaaatcccggcaatgtctgtgcctgtggagaaaacataagagcgatggaaagaaacaggagaatgtactgaaaaataaaaatataaatgttaggatttggtaaaatcattcaataaattcggttttcttctggaaatatgtagcataatagcataaaaaatagtataataggcacagaaatatgaaagagagggcatacatatgaagcaaaataacatgttggctatgatcctggctggaggaagaggaagcagacttcatgacctgacaaaaaaagttgccaaacctgcagtatcatacggcggaaaatatcggatcattgattttccactgagtaactgtgcaaacagtggaatcgatgtagtcggcgtactgactcagtacgaatccgtcctgctgaacagttatgcagccgcaggaagaagatggggtctggataccaaagacagcggcgtatatattctgccaccacgggaaaaagcagatgcaaacctggacgtatacagaggaactgcggatgctatttctcagaacattgactttattgatacctatgcaccggaatatctgctggttctttcgggtgaccatatttacaagatggactacgatgagatgcttgattaccacaaagaacatcatgcagatgcaaccatcgccgttattgaggttccgatgaaagaagcaagccgttttggtatcatgaatacagaagaaggcggaaaaatcgtagaattcgaggagaaacctgcggagcctaagagcaatctggcatccatgggaatctatatctttaactggaaactgcttcggaagatgcttcttgctgatatgaaagatccggattccaaccatgatttcggaaaagacatcatcccaagaatgctggaagaccagaaaacactgtatgcatataagttcaaaggatactggaaagatgtgggaaccatcgattccttatgggaagccaatatggatctgctggataagaacaatgcactggatcttgccgacagttcctggaagatctatacccaggataccgatgcgctgccacagtatatcggtgcgcaggcgagtatagagagagcatttatcacacagggatgtatcgtggatggtctggttaagaactctgtcctgtttacagaagcaaaagtagcaccgggagcaaaaattattgacagtgtactgatgccgggtgtggaagtagaagaaggtgcagtcgtaacacgcgcccttgtcgcggacaacgtaaagatcggaaagaatgcggttgtcggcagtgcagacagtgaaaatatcgaactggttgcaaaacgtgtaaagggggaagaataagatgagtagagcatttggaatcgtaaatttcgcaggcaataatatacaggggaatccgatgcaggcttatcgtccgaccggagcgatctcttttctcggaagatatcgtgtgatcgacttcccgatttctaatatgagtaacagtggaattgattctattcaggtgtacatccgcagaaagccacgttctctggtagaacatctgggaaccggacgtcactacaatatcaattccaaacgtggcaatttaaatcttctgttctgtgaaaacggagacgaaaatagtatttacagtacggatctggcagcttatgtggaaaacctggatgccattgaggagatgagtgaagagtacgtagtcatcgtaccaagctatatggtttatactgcagattacgaagaatttttacagaaccatatcgaatccggtgcggatatcacactgatgtatcagaatgtggacaatgcaaaagatcatttcctgaactgccaggtgctgaatctgaacaaacaaaaaggtgtgctgtctctggaaccaaaccacggaaatgtaaaaaacagaaatattttcatggacacctatgtaatgaaaaaagagatcttcctggatctgatcgataaaggacgcaagctgtcttccgtatatacactggcagatgcactcaatgaatcctgtggagagatggatatccgtggagtatctcacagaggttattttgcagcaatgaccgatctcaagagttattttgatgccaacgaagaactgcttgaccgcaggaaagcaagagagctgtttcatgaagagtggacggtctatacccgtaccaacgattcctgcccgacccagtattttgaaggcagcaatgtaaaatcatccgtaatttccaatggatgtctgatagaaggaacggtagaaaattcaatcattggacgtggatgtgagatcaggaaaggtgcggttgtccgcaactgtgtggtaaatgcagacgtagtgatcggcaaagatgtgcatgtggaaaatatggtcattgacaaacatgcgaaactgatccacagcaatcagattattgcagagccggaaaaaccgggttatatccgtagaggagacaagctgtaagagcagacaggatattataatgcagattgtgtggcaggatcacggatcaaaagatcccatggtttattgatcacgtaaataatcgtatctctgtgggaaagtgacgaagatgcatgcgaaaagcggaagctcttttgctactgaacgatcggtagaaaaagagcttctgttacttattttattccgattatttttccggaagtgtttgaattttgaacgagagtacatgggaaagaaaaggagtgagcagatggaaggacactcgatatccggcgaaagccggaaaaacggatgggtggaacagaaaaaggaattgacgaaagtattgaaaatcgcatggccggcagtctttgagtctttttttatctcgctggcgggcatgatcgatgtctatatggtcagtggactcggttcggaagcagtggcttcggtgggactgacgacacagccaaaattcctcggactgtctttattttttgcgatgaacgtggcgattgccgcgatcgttgccagacgaacaggagaaaaagacaaaagaagagcaaatgaaacgctggcagaggcaatccttcttacgattctcttcggcgcggtcatcacggttgcctgtgtgagtctggcaggatggctgatggaaaagtgtggatccgcaccggatacccatgacggagcggtgatttattttcagattattatgggtgggatgatctttaatattatatccatggtgatcaatgctgcacagagaggggcaggaaacaccaaaatcgcgatgtataccaacaccatatccagcatcgtcaatattattggaaattatcttttgatcggcggtcatcttggcttccctaaactggggatccgcggagcagcactggcgacggtgcttggaacggttgtggggtgtacgatcagtgtaatgtcactgtttcggaaggattccttcctcagtattccgtatattataaaagaagggctgtggaaacggttcgaatcggtaaaaataatcttaaaactttcaagcagtacattcgtggagcagattctgatgcgtatcggttttatgtcaaccgctgtgatggcagctgacatgggaacggcggcgatggcggcacatcaggtgggaatgaatgcgctgagtctgtcgttctctttcggcgatggtatgcaggcggcagccgtggcactgatcgggcagagtctcggaagcaaagaaccgcaggaggcaaagcgacacgggatgacctgcgaaaaagtggcacttgtgatggctgtttttatgtccatgttctatctgttctgcggaaagtggctgttcggactgttctttgcagaagcacatatcgtggagatcggtgtgaggatcagccggattctgatagtgatcgtactgttccagatctgtcaggtggtattcaccggagcactgcgcggtgcgggcgatgtggtgtacaccatgatcagttctaccatcagcgttacctttgtgagaacggctgtttcgtatatatgttgctatattgttggctggggaatctacggaatctggatgggtatcgtagcggatcagttctgtcgtctgatgctaagcggcatacggttccggagcggaaaatggatgaaaatcaagatttgacctatttataaaaattttatggtgcctgacaccgtttccctcttgacgaacaggcaaaactgcgttatgttattagacgtaaattgtatagaaagcttttctcttattcagagtgatggagatacataggatctgtgaagtcacggcaaccccggatacggaaggtgcctacctgagcgagtaatcgaacaataaggggatttgatatatcgaagtattgagtccgcttttggcgggctcatttttagattatacgttggaaagaaaatgcgataggacattatcttgaacgataaacccgggagaaaagcacccaggggtaaaccccagagaaaaaggagaatgagaatggaaaaacgtttatttacttccgaatctgtaaccgaaggccatccggacaaaatctgtgaccagatttccgatgcagtcctggacgcactgatggaacaggatccgatgagccgtgtagcctgcgagacagctatcaccaccggtctggtactggttatgggtgagatcacaacaaagggatatgtggatatccagaaaatcgtaagagataccgttcgtgagatcgggtatgacagaggaaaatacggttttgattcggagaactgtggcgtgatcacagccatcgacgagcagtccaccgatatcgctatgggtgtcgacaaagcgctggaagcaaaagaacataaaatgtctgacgaagagatcgatgccatcggagcaggagatcagggtatgatgttcggtttcgcaaccaacgagacagaagaatatatgccgctggccatctctctggcacacaaactgaccagacagctgacaaaggtaagaaaagacggcacactggcctatctgagaccggacggaaaatctcaggtaactgtagaatacgatgataacggaaaagcataccgtctggatgcagtcgtactgtccacacagcacgatccggatgtaacacaggaacagatccacgaagatatcaaaaaatatgtcttcgatgaggttcttccggcagagatggtagatgcagataccaaattctttgtaaatccgacaggaagattcgtaatcggcggaccaaacggtgatagtggtctgacaggaagaaagatcatcgtagatacttacggtggatatggtcgtcacggtggcggagctttctccggaaaagactgcaccaaagttgaccgttccgcagcttacgcagcacgttatgttgcaaagaatatcgtagcagcaggtctggctgaccagtgtgagatccagctgtcttatgcgatcggtgtggcacatccgacttccatcaacgtagacaccgcaggaaccggtaaagtgagcgatgaaaaactggtagagatcatccgtgaaaacttcgatctgagaccggccggaatcattaagatgctggatctgagaagaccgatctacaaacagactgcagcttacggacatttcggaagaaatgatctggatctgccgtgggaaaaactggataaagtagatgtcctgaaaaaatatctgtaagatattattgcacagagtaaatatacaatataaaggttgagagtaacgattcagtaggcagtatttcgcgagggtactgaatcgttacgattgagaaacgaaactgccgcaggaattttaacttcctgcggcaattttgttttacttgcattgcatatcaataattagaaaagggagggccggggttttagtgccccggcagtatgaaaaagtgttttggcagctggtgcaaacagctgcacgaatctatataaaaggtaattgttttttgtcgaggtccgacagtcacagggtttgtaaaatattccggcaacgatgttcagtctttgttactggctctggctgtcatcatctgcatccgccgtcctctttgttttgatactgtaagtatacatggagtttgtgtccattttatggaaatgagataaaggatttctaaactcttttaagaaatgtttaaaatatctggaagagtttccggtggtctggtaagatagatgggagtgaatagaaagagagaatgctgattatgggcaaattgttttatattatgggaaagagcgcatcgggaaaagatacgatttatcagcgccttttaagaaatccggagttttctctggaacgtctggtgatctacaccacccgcccgatccgggacggggaactggatggcagggagtaccattttgtgacggaagaggattttcagaaactgaaagcagagggaaagattatcgaagaccgggggtatgagacggtttacgggctgtggcggtattttacggcggataatatgaatctggaagagaaaagctatctgggaatcggaacactggaatcctatgaaaaattaaaggcatattatggagaggaaaagatccgtcccatttatatagaagtggaagacggagaacgcctgaagcgggcaatcgcgagggaagagacgcaggaagcaccgaaatacgaagaaatgtgccggagatttctggcagatgcacaggatttcagtgaggaaaagatccggcaggcaggaatctcccatagattttccaatatggacggggcgggaggctactctgagattgaaaagtatttaaggagtgtgctataataatgatattccgcagacagagtacaatataatatagtattcttttgcgcaaagatattgtgaaaaaagcagctgtggaagcctgtggtgataaaaccggagattaccacagaaaacaaaagaacacaggaggtgattgtatggcaggatttcatgagattatcggacatgatgatgttgtaaatcatttacagaatgccattcagatggggaaagtttcacatgcgtatatttttaacggtgaggtaggagcaggaaagaagatgttggcttctgcatttgccatggcactgcagtgtgaaaagcatggaacagatccatgtatggaatgtgactcctgtaagagagcgttaagcaaaaatcacccggatattattacgatcacacatgagaaaccgaattctatcggtatcgaggatattcgtatccagctgattgatgatgtatccatcaaaccttatacaggtccttataaaatctatattctgaacgaagcggaaaaactgacgctgcaggcgcagaatgcattgttaaagaccatcgaggagccaccggcttatgcggtgatcctgcttttgaccagcaatgcggattctctgcttccaacgatttcttcccggtgcgtgaccttgaatctgcgtccggtgaaagaaagtgatgtgaaagaatatctgatggagcatatgcatctgccggattatcaggcgcagatcgacgcggcgtttgcccagggaaatatcgggaaagcaaaacagatcgcagaatctacagaatttgccgagatggcggagagagctttccgacttctcagaaagagcaatgagctggaactgtacgaactggtggagatgatcaaagaactgacagcggaaaaacagaatatttacgattatctggatctgtttaccatgtggttccgggatgtactgttgtttaaggcgacaaaagaagtagatggtctgatatttaaagaccagtataattatattaaagaaagagcaaagaaaagttcctatgagggtatagagaatattatagatgccataggaaaggccagagagcgtctgcattccaatgtaaattttgatctggttatggaactgctcttcatgacaatcagggagaactagaatggtaaaaattatcggtgtccggtttcggaatgtaggaaagatttattatttcaatccgaagagttttcagatgaaaccgggagatcatgtaatcgtggagacagcccgcggtgtggaatacggcacagtggtactgggtccgaaagaagtagacgacaggcaggtggtacagcctttaaaagatgtgatccgcatggctacacagaaggatgatgccaaagaagagagtaatcgtaaaaaagagaaagaagcatatcaggtctgtgtcaagaaaatccgtgcgcatcagctggagatgaagctgatcgatgtggaatatacctttgacaacaacaagattctcttttattttaccgcagacggaagaatcgacttccgtgaactggtaaaggatctggcggcgatcttcaaaacacgtattgagctgcgtcagatcggtgtgagagatgagacgaagattctcggaggtatcggtatctgcggtcgccctctgtgctgccatacctatctgtcagaatttgctccggtatcgatcaagatggcgaaagagcagaatctgtcactgaatccgaccaagatctcaggtgtctgcggccgtctgatgtgctgcctgaaaaatgagcaggagacatacgagtatctgaacaaacagttgccgaatatcggagatcaggtaatgacaccggaaggtatcaagggtgaggtacagagtgtcaatgtacttcgtcagctggtaaaagtgattatggatgtcaacgatgagaaagagatccgtgagtataaagtagaagagttaaaattccgttccagaggatgcagccggaaagagaagatgaagctttccaaagaagagcagaagatgatgaaggaactggaataatgacaggagaaaaagatgaatatcccattgaaggaaaatgagcgtttggatgatctgcaaaatggctatcatattatccagaataccagggatttttgttatggtatcgatgcggtgctgctgtctgactttgccagggtgaagaaaggggaacaggcgttggatctgggaaccggaacgggaattatccctattctgttaaaagcaaagacgcagggagagcattttaccggtctggagattcaggagcagagtgccgagatggcagggcgcagtgtggtgtataatcatctggaggatgcgattaccatcagaacgggagatatcaaagaagccactgccatctttggcagggcttctttttcggtagttacctgcaatcctccgtatatgcatggcaatcacggtctgaccaatcctcatctgcccaaggcaattgcacgacatgaggttttgtgtacgttggaggatgtgatctctcagacggcacagctgttaaagccacgggggcgattctatatggtgcatcgaccgtttcgtctggcagagatcatgggactgatgatgcaatacaaactggaaccgaagcggatgcgtctggtgtatccgtatgtggaccgggagccgaatatggttctgatcgaagggcttctgggaggtaattccaggatcacggtggaaaaaccgctgatcgtatatgaaaagccgggcgtgtatacacaggaaatccgggaaatttacggggatggaagataggaggataccgatactatggcaggaaaattgtatttgtgtgcgacaccgatcgggaatctggaagatatcacctttcgtgtgatccggacgctaaaagaagtagatctgatcgcggcggaggatacaagaaacagtatcaaactgttgaatcattttgagatttcaacgccgatgaccagttatcatgaatataacaagatcgataaaggtcattatctgatcggtctgatgcagcagggacagcagatcgccctgatcacggatgcaggaacaccgggtatttctgatccgggagaggaactggtggcgatgtgccatgaggcagggatcccggtcacttcgcttccgggtccggctgcgtgtatcacggcgcttacgatctccgggttatcgacgagacggtttgcgttcgaggcttttctgccgacggataagaaggagaaacaggcgattctggaggagttaaaagaggagacgagaacgacgattctttatgaagcaccgcaccggttggtacggacgctggaagagctggtggctgcgctcggaaaccggagggtgacgatctgcagggagcttacgaagaaacatgagacggcgtttcttacaacgctggaggatgcactggagtattaccggcaggaggatccccgtggagagtgtgtgatcgtgatggaaggcagaagccggagagagatgatcgaggagaagcagcgggcatgggaagagatgtcgctggaggaacacatgaagatctatgaggatcaggggattggacggaaggacgctatgaagatggtggcgaaggaccgggggatctcgaagcgggaggtttatcaggggttgctggattaaattaaatttttggttaaggggacgcccggtgtgagaacaacaagaggacggaggcagcgtgcagagcgactttaagctatctgccaactacgactatatttgcgagggtcagctgaccctcgcaaaagtctacgtaggcagaggatcttaaagttcactctaagcggcacgcaaaatgcctccgccctcttgttgttctcacaccgggctgtgtagtggctgaatctttatttgaatatagagtttggttgtggcagtctctgatggcggggaaaggatggatgaaagttgtatatgaatgaatatagtttaaaaatgataatgcattttattgacatataataaaacccctcgggagatgtgttccgaggggtttttggaaatggcaggttgttaaattgtatccataaggtctgcgccgctgatgatgcggtgccagaggttttcgcgtttgggggttcccgggaggaagtaggggaggcggtcggcttccagttcttccaggcgctttactctgccgtcgatatagtaacggagacggtagcgggtgctggtaaggcgggcgatgacgccggagagtttgatgtctacgagttcatagccgaaaggttttgcgtcctgcatccagaggtgttcgcgcagaagtctggttgtggacagatcgttgatgattccggggataacttcttcgcagatggtttccagtgtggataagtcatgggcatcgtatgcttttttcaggcggacgccaaggtcggctttgccggcgagcgtgctggcgagactgtgatagaaagcaaacagcgtatcataagccggagtatgttttcggcagatttccaggcggtctgccagatcctgataataacgttcagtgtccagatccagatcttcgatatggcggtcaaagatgccgagaagaggatcctgatacagcagatatttggacggattatcggtgtccagattcggctgtccgttctggaacagggagtccagggcatccagttccaggaagtcgttcaggccggcaccggtcacatcgtggaattcttctgccagtgctttctcatcgaagtcttcatggaagccaagatgagcgaacagcaccagaccgggcagaacggcatctacaggagtttctgcaccgttatccatccaggcggtacagaagacttccggcagatggtattttttgcatgcggcaagtcccgcacgggtgcaggtaaaggtcttggaatagtttggtgatattccgttccagatccaggaacctccggcaaagatgactttgttggaaagctgctgatgaacgcggatcattttttcatagattttctgatccgggttatagtagtcccagtaaaccagtccaagttccggatccggtttttcccagtcactgcagtctgtatcgtcggaaacatcataataaccgccgccggtgttggcagtgatatacatatcgctccagatcatcggctccagccccagttttttgcagatttcaaaaacgcgggcactgtgttcgcgaatcagaacggaacttttggtatatccgttttcccggaggtactttccaaggccgagctgtgcagcttcgtccatgccaagatgtacccggttggtggaaaaggactcttttacggagcaaagcattttttcaattagggtgtagacttcctcttttcctacctgaaggatgtcggcggtgtccttgacggtttctccaagcggccatttcaaagcattgtgaagatgggccagtgtctggatacacggaacaagttcaatgccgaaggttcttgcataagcatccatctcgcggatctcatcctggctgtagcggccgcggtaggcaccgaaataaggttcatccggtacggtgtaagtctcttcggtgtagagcatcagggtgttcattcccagtttcgccatgatacgaataaaagattttaccttttctacggtaaatactgcatttctggagcagtccagcatcactccgttttttgaaaagtatacaggttcactttttgtgttccaggtatcctccggatgatgtaccgcccagttcagtccccgataataatgcgccggttcctgacaggtaatatgcaggtgatcgccgtttcgtgcgatggtaagcggaacattttcctgaaactccacctgaatcgccagttccttttctgatttgatatcccccaataaaagttgcgttccttcttccactttttccaggtcagtggaggaaggggaaaatgaaaatttcataaccttctcctttcttccgaaaagttttcggacaagcttttgccttatgatttattgtaacgaatggaggggggaaagtaaagataatgggggagaaagaagtttcagaaataaaaaatatacgtgtgatcataaaaagctgctgtattacatgaacgggaatatcgttgcagcaatgctttttcaacattacagcattttcataaagaacggtagagcagttacgtatatttttacgatgcagggcgtatacataatagaatccaacaaaaacggagcagctttttatgaattatctctggggcggtatgattctgatcgggattatctacgggacagtgaccggacatctggaggaagtatcagaggcggcgattcagtcttcaaaggaggcagtgagtctgtgcgtggtgatggctggggttacggcactctgggttgggatgatgcggatcgcagagaagtccggacttctggaggcaatggagcagagaatgcagccggtgctgaactttctgtttccggaaatccccgggaatcacccgtcgaggaaatcgattgcaacgaatctgctggcgaatatcctgggactcggctgggcggcgacaccggcagggctgaaagcgatggaagaactgtcggatctggaagaagagcggcggagaaaaaaacagcgggcggtagctgtgggtgcagcaagtaatgaaatgtgtgattttctgatcctgaatatatcttccctgcaattgatcccggtcaatatcattgcttttcggacagaatatggcagtgtgacgccaacggcgatcgttggtccggcaatccttgcgacggcgatcagtacgggtgctgccgttttgtatatcaaaacaaaaaactggatggccagaccgaaaaaagctaacaatatttttacgaaaatggtattgaaaaatgaaaaagcatcgcatataatgggtgaaagtaaataatgtgataaagatcccggggctgtgtccccggatttttatcgcgcaaaatgaggagtttttatgagaggaggaactttatggagagagatatgacggtgggaacaccgtggaagattatcctgaactttacgatcccaattgttattggaaatatttttcagcagttttacagcatggtggatacggtcattgtcggtaagttcgtgggaacgaaagcactggcggctgtcggctcgaccggaacgatcgggtttctgatcctgggattcctgatgggacttacggcaggttttacggtgctgaccagtcagcgattcggtgccggagatatgccggggatgcgaaagacggtcgggtctgcggcagtgctttcggtgatcgtcagcgtggtgatgacggtgatcagtatggcgtttatgaagcctttgctgattcttatgaatacaccggaggatatttttcaggatgcgtataagtatattatgatcatctgtgcggggatttttacacaggttatgtataatctgttagcgggtatcctgcgtgcgctgggtaacagtaagacgccgttgtattttctgctgttttccgcagtactgaatattgtgctggatctggtactgatcattgtgtttcacctgggagcagcaggagcggcgtatgcgacggttattgcgcagggagtttcggcgctgctttgtctggtctatattattaagaaagtgccgattctgaagctggatcgctgggattttaaactggatggtcatctggtacggcagcagctggccatcggttttccgatggcactgcagtattcgatcactgcgatcggtgcgatgatggtgcaggctgcgctgaatgtgcttggttctgtgcatgtggcagcgtttactgcggcaaataagatcgagcagatagtaacgcaggtttatgtggcacttggtaccacgatggctacttactgtgcacagaatatgggtgcgggtaaggtgaagagaatcagcaggggattccgggcaacaacggtcattggcagcatttattcggtcgtgttcggagtgctggtgttcttctttggcaatatgctgaccggactgtttgtgtctgagaatctggatcagatcgtgggtctggtggatatttatatgaaatgcgtggcgctgttctttattccgcttaatgtggtaaatgtgtaccgaaacggtatccagggaatgggctatggattccttcccatgacggcagggattgcagagctggcaggaagagggctgacggctgtggttgcttcgcattataagagttatctggggatttgtctggcaagcccggtggcgtggatttttgcgtctgcactgctgttggtgatgtattttgggattatgaataagtataagaaggctgggaatttccgggagtaagggaagtttgttgtggcaaaagggacgcggcagactcctggattcctggtctggcaacgtgggcagggcaactttgaactagccactaactgcgactatattcacttgggtcggctgacccaagcgaaagtctccgtaagtgtcggatttcaaagcttgccctaagcgcccacaaagtgttgccagaccaggaagccaggagtctgccgctgttttttgcgtgggggagatagtggttgagagtggaggggggtggctggtatgggaaaatgaataaatgctataggggtagtacaggagaaaatgtgtgcgttatacgttgtatcggaagtggtttttgggataattggtggtataagtaagagattataggcatatggttgtttttatgtaaaccaggtgagaaagtaaacgaatagagatttacataaggtttgctatgacggtgctggcgatgattccggacagggtggcgaggagggcgccggggagggtgtagcgggggttttggactttggcggctatgtagtagacgcttagggtatagaagatggtttcggtgctgctgaggatgagggaggcggtcaggccgatggtagagtcggggccgtgttgtttgtagaggtcgaggaggagactggtggcggcgccggaggagaacatttttacgatggagaggggaaccagggcggaggggaagccggtgggtttcaggaggttttcgaggagggatgcgagggcatccaggaagccggaggcacgcaggatccccacgccggtcatcagaccgattaacgtgggcatgatttttaccactattttcaaaccgtcgaaagcaccggtgacgaagtcgttgtagatgtcctttttcatcagaagaccgaagccgatgatgtagaaaaagaggagtgggatcatcagatctgagagaaaaagcaggatacgcatacaaagctccgggaaggattgttctttgtaaatgtatgcggaaaggggataggaaagtacaggaagagggatagaaaataaatttcatttttcaaaaaagatcctttgtaagaaaaacggtgaaaaagctttttcttacagaggatcttttcaattttcgagggagggcgaaatgtggaattaaccgcagcccctttgtgttatttatgcaatgacaaaattaatcagtgtatacatttcacatatgttgttgttgatatttttaccacattttttttgactttacattttgtacatatttttgcagaataacgggtaacagtacagcctccatttttatttactgcgtggaggtaaacatatccattttcatatgtatgtgagcaactgacacgtgactctcccgatgaattcggaacagcactatcaagcacggatccatcttcaagaataatacattcgtttgaagatgaaaagtcaaccagttggtcatatgggtcagcatagttagaaggtgtttcatcgataagtgttatgatttcttccgttaactttgaatcttcgtttggagaaaatgcagtggtttgttccaaaggtgtatatgcataggtggttagcggtaaaattataaggcataaaagtgatagagcaccatataacattatttttttgctcacgcctgtagtgttcataatatacaataatctcctttttactactttttttgaaacagaaaagttatttttccaaatctttggaaaaggtgattctgtggaagcgatatttaataatagagtggcatactcttttcgttctgtgtgagaggaaaatcgctggattactttataatcgcataaacattccgcagaatatgagtacaccggtaaaaaaaaccatacgaatggattgtaccagtgcaggcaaaaacatatcataatcagaaatttaaaaatcgaatctttgttttcaatgtgagctgtttcatgaataaaaagcatttctttttgagaatcagtaaaattttgatctggaaataaaatataagatttaaaaaatccaagggtacaaggtgttttcagtaagggattcttatataaacacgagtctttctgaaagttgaatgatatagatgtttttaaaagtatgttacatgtttttctgtatgttctgaattcataaatacagaatattaaaatactgcctgtaacaatcagaagcagaaaaaacatccaaaacggcaccaatattgttttgtcatagaaatgcaactgcaatttattttttaaagaaagaatataagtataattattatcaatggtaaaaaaattatgagttacaggaatcatgtttttaataagctgaagtggtagcaaataaagaataacactcagtttaaacaatgaatttacataatagaaatttgtctgctctttttggagtatcataacaagcaatccgatacaaagtgggattgacccggctaaagacattgaaaaaaacagtggcatattataatcctttcagaaaatccattaattcttccttatctgaagcggataattttttattcccggtaaatgcgctgataaaagaagttaaagaaccatggaaagaggtttggattatctgagaagtatattgttggtaatattcttccgaagataatgccggataataagtgacttttgcttcttgatggttggcgtataaagcctccttttttactaagcggagtagaaatgtgctcagcgtctgttttttccagtttttgtttgtggtggcttcaaaaaaagcttttatttctgagaaagttttgggggtgttttgtgaccacaggtattccatgatcataagttctgtatcgcttagttgttgaaacatagggtctcctttcaaattttccgtactacggtttataatacaataaaaaacagaaaaatcaattgataaaacaaatgaaaacagaaagacatttctgtgaatattgtcgatagtaaaaagcttgtgaagagataaaagaaatgttatagtaacttcataggattacacgatgtagttcaatatttattgaagtaggtgatttcattgcgtgtgaagaaaagaattctaattattttggttctggttttattgatgatgtttgctttcatactgataagtaaaaagattatgaacagtatatggtttaaaactcgatgggatattaactttccatttgttgaatcttattatacggtcgacgacatgtgggaatcatataatatttattcatgctcagaaaacgacaaaaaggttttaaaaacatcattgtacaagcagaaaccaacaaagtattgggaagaagaaattacaggacatttagaaaatctgaatgttgatcctgtaatgtatccttctttttctgaagttaattattgcataagaaggcaaaagggagacgctgaactgatcatgcttatgaatagttcacaagatgtattatatgtttatacatgtacacggtaaatacggagatgtatttttgtaaaagattaaagaaccatggaagtaaattcgttcaggaacagatgcatgaagtaggaaacgtaacgatataaaatatagagggagaaaagccatgagaataagaaaactgatatggatattagccggatgttgtctgctttccggatgccaatctggtaataaaaatcttagtgagaaaaatgtgagtgatactgaggttacagaagaatcttcagagagcaggaaagaaatcgaacaggactttccacagaggattcaagaggatgtcagcgaaaatgttcatatagatgcagaatgtgtatatcctgagaattttcaggaggggaaagggctaaaagcggttcagtccggaagcaccctgtgggaacaacgggagcagattgtagacaaatttgcgaagggaaatccggtactggatgtggaagagacgtcatatgatgattttcagtcagaatcctatacgttaacagaaacgacaggcatttccattacatctgaaaatgttttaaattatttcagtgatcaggctacatatatattaaataccattatggaagatgaccggtttgatacctataatgggaatgagtttcaaacaacaacagatcttgctttcatatcacaggaagaggcatggaatcagataaaatcttttttacaggaaataggagtagaagttacagatgcgtatacctgttatgtcatggattataaaacgatgcagcaggaagaagaaaaaatgtatcagcttttacaagaggaagatgcaaagacattcgagaagaaagaacaatggtcggcagatgatgacagttattattttaaaacgagcatagcatggaatgggtatcctgtaattccttatatgagcggtgaaggaaatgacgaacagaatgtaagtgttgtttacgacaaaagcgggattatttcaatgatgatcatcggtcattatcccatgcaggaaaaagaggaagtcaatatagaatcaccggtaaaggtggcagaacttttagcagaacctttaaataatattctttcagatacgacatatgagatacagaaactgacactttgtcaggtcgttataggaaaaaatcatgaaacgggaatgtcagagattgttccgtgctggaagtgttctgtacaggtaaaaaatgatcaggaggatcccggatatacgacctactattattataatgcagaaaccctggaaagcataagttaagtgaacaacgggagggtataagtgaaatctattataaagacggatttttccagagcattcataaattggaaatttccactggcgattcttttgatgtttcttgtatgggatcttaacagcaaacggtttggtctgcgggaagatgttctgttttattttatcaatgtttgggggaggtcaattacttatctgatggctatattgatctctacgattccatttttatctgcacatatagaagaaaaagaaaatcattttttacgatatgcgattctacggacaggtgtatggaagtatgtttgttccaaattaattgtatgttttatatcagcattttctgtgtgtgttcttggaacggttctttttttgataaaacagagtttctatgttccgttcctggcggaaaatagtgttacgttagataattttgcgcctatgagctgttttcgtggattgatgattagtcatattaagttagcggtcacgatacagaccatattatatggaatgttatgtggcagcatgggtgtgctgactatggcattttctgcttacattaataattcttttgaaatctacgtcattccttttcttttatattattgtttttatttcttatttgcgggattcttcaaatattgtcctatgttaagtatagagcatatctatgaagcaattggttgttatacgaaaaatcctgtgttatttttcagctacgcatttttcataacgatatgttttgggatagtgggtggaagattgatgtatcgtaagatgaagggggaattccaatgaagatgatactgtatagtctgaaagtatgtttatatcagatccgtattatgtctaaaaattacaaaatatatacaatccccgtatgtctgtttatttttatgaaaagcttcctggatccttttcgtgaatttctgattgcatcaggggagaaagcaaccccttttttatttcctttttttctgaatggaaaattctgtgcggcggtggtgtttgcagggatagtattgttttttgtggatgctccgttttatgataaagataaactattcgtaatgatccggtgtggaagagcgaaatgggttacaggacattttttttatattatttttgttagtattggttatatgctgtgttgggttggaatcagtgttctgatgttgataccaagaattgacttcagtaatgagtggggaagggtgtggaccacattggcacttacagataaagcatatgagttaggattatcattttatgtaactccggaattagttatgaattatcagcctgtgcgggcattttttcttgtgtttggcatgggatgtctgatctgtattttttatgggttatgtatgtggctcttaaacatctatttagggaaaattataagttttgcggtgatcatggcttctgtattactggttacaagagtagagtatatgccgccctggatgatttatcttgttccaagtggatgggcagatgttggaaatctttcggcgtatacagctcatggactttcaataaataaagcgaacctgattttgattatcggaagtatattcctgggaatattagtgtattggaaaacaattagaatagatatggcaaagggatgataaagaaaatgagcaaaccggtgatttctatagaaaatgtagtgaaaagtttcggaacagctgttgttttggatgatattacacttgatgtggagaaaggaaaaatttgtggaatcataggaagaaacggttcgggaaaaaccgtgttatttaagtgtatctgtggcttattaaatattgattccggaaagatacaggcagatcggacacagcttggtgtaatcatagaggagcctggatttctacggcaatatagtggaaagagaaatcttcaacttctggcgggactttctgataagccacatatggatattactgaagtgatgacattggttgggctaaaggatgcaatgagtaaaaaagtcggaaaatactctatgggaatgcggcagaggctgggaatcgcgcaggcaattatggagtatcaacaaatcttgattctggatgaacctatgaatggactggataatcagggtgtgaaggagatgcgggagttgttgatgcagctgaaagagaagggaataacaatcttactggcgagtcataatcgtgaggatatagaagttttatgcgatcaggtctatgaaatggatgcggggaagttaaaagtccgcgctcaataggtgagagttctcactgaatgtgaagaagcaacggcatctataaacaagtagcgaaagttcgatttgacaattacatatgtatacaaaaagggactgtctggaattgacagccccttttcttacgttatacgaacaaacagtgaaaggatattatcggcataagattaagccgtttttttcgcagaagatttcggccatttctttgcctggtaacagtagtaaacgataaacattaccgccgtgatcgcccaggtgaccgggtagctgaggacgatggtgttgaggcccggagcgagtggtacgatgaagaagagccaggcgatacgcagcaggcagacaccgaaacaggtgataagcatcgggatcacaacatctccggttccgcggagtgcaccggagagcagttcgatgaagacgaacaggcagtatgccggagcaacgtggtataacatctgcataccgatagagactacattttcatcggaggtaaacagacgaaacagcggagttccgaagttatagaatatgagagtcaatgtcagagctgtacaaagccccatacaaagcccgatgcggacactctttttcatgcggtcgtattttccggcaccaaaattctgtcctacgaaagtcgtaacggcgataccgaacgcattattgaccatccagtataaagaatcgatctttccgaaagcactccaggcggccactgtatcggttcccagattatttaagaacgtctggatcagcatgttggtgacactgtataaaactgactggatgccggtaggacagcccacccagatcaaactgatcagagcagatttgtggaatcggatctttcggaactctagctgatacagatcgtcggaatgcatcagggcgcgggtgatcaaaacggcactgactccctgagaaaaaatcgtggcgattgacacaccggcaactcccatgtgaaaaacgatcaccagcacgatatccagcacaatattcaggatacagcagacgatcagataatataacggtctgcgggagtctcccatcgcacgaaggatactggaacccacattatagataaagacaaagataataccggcgaagtagatccgcagatagagcagtgcatccgccatggtttcctgtggtgtgtgcatcagttcaagcatccagggagcaatcagaattcccagaacggtgatgaaaatacttccaatgatagagaatgcataggcagtatgcagagcacggttcagctgcactctgttctttgcaccgtaaaactgggaaatgataaccgaagcaccggaagccagtccgacgaagaagcccacgatcagccccacaatctgtgcggcggaaccaccgacggcggcaagagcttctttgctgacaaaacgtccgacaacgatcgtatctgccgtgttgtacagctgctgaaaaaatgttcccagaacaatggggaaaaagaacaataaaagttgtttccagatcacgccctcggtgatctgattggttgtaacagtttctttcttcatttgtgtaaaaaccctcctgtgtaaaaaaacgccctgcattttcccccatgaaacatgcagcgctcttatgttcagcataagcgaaaccatccagaaagtcaatgggtggaaggacggaattatgaattttcaaggaagatgaaagtacttgaaagtggaagaaaacatgttatactggatgtagaaatataataattatttgtaactattcagtaggtaatattccgcgaggtgttttggcatggatatgccaaaatcccgagacatacgagcaaaaatgccatcaccgaaggtgatttcaaatgcatttttgcttgtaactgtgaaggtactgaacagttacaattattttataacaggaaaaggtagctgtgaaggaccggaacagctgcaagcagatgccggaaaggattggaagatgagttattacagaaaaacaatagtacccaacatagaagcccattatgaaaatctgtctgcagtggaaaaaaatatcgctgatttttttatttccaatgaggaagatatggatttttcatccagacatatttcttcgatgctgtatgtgtcagaggcatctctgtcccgattcgcgaaaaaatgtggttataagggctatcgggaatttgtgttcaaatacaaagaatcattcggagaaaaagatcaccagatcacaggacagatgagagaagtattcgactcttatcaggagttactgaacaaaagttataatctggcagatgaggcgcagcttcgccggattgccgggaagatgtcagagtgccggagggtgtttgtttacgggaaaggaagttccagcctggcagccagagagatgcagtttcgtttcatgcggctgggactggatatggatgcggtagatgagactcatatgatgcggtttcattcgacgatcgtacaggaagactgtatggcgatcggcatcagtatcagtggcaggacggaagaagtgatggaatgtctgaaacaggcacaccggcagggagcctatacggtactgctgacagccaacgaccgcccggaatacagtgaattctgtgaagaagtggtatgtctggcggcaaagaaaaacctggactttggcaatatcatctctccgcagtatccgattcttgtgatgacggatattttatacggatattatctggagatcgattcatctgtcaaacaggcacggcatgataattctgtcatgctcttaaagtcaagacagattcaggataaggacgaaggaggagaagggaaacaatgatcatcaagggagcaaaagtctataccgaagagggaacatttgcagagaaagaagtctgcacagaaggggaagtttttacagaaaccagtggggacggagaaaaagtggtagatggcagcggctgttatctgattccgggactgacagatattcattttcatggatgcatgggaaaggatttctgtgacggaacggaagagtctattcaggtaatggcagattatgaggccagccagggtgtgacaacgatcgcaccggcaaccatgacgtttgatgaggagcggctgacacggatcgcgaaagcggcgaaagcccataaaaatgaaaaaggtgcgattctttgcggaatcaatatggaaggcccgtttatctccatggcaaaaaaaggggcacagaacggaaaatacatccacaaaccggatgtggcaatgtttgaacggctgcaggaagccgcaggaggtctgttcaaactggtagatctggcaccggaagaagaaggtgcgatggaatttatccgggcggaaaaaggaaaagtcgtgctgtcgatcgcacatacaacagcggattatgagacagcaaaagcagcgatcgaagcaggtgtcactcatatgacccatctgtacaatgcgatgaacccgatcaaccaccgcgcaccgggaccgatcatcgcggcagcagatgacgaatactgtgaggccgaactgatctgcgataacgtacatatccatccggcaatcgtgagaaatacattcaagatgttcggagaggatcgtgtgatcttcatcagtgacaccatggaagctgccggtctggaagatggcatgtatgagctgggcggacagccggtgatcgtaaaaggaaaccgtgcgaccctggaagacggaactattgcaggttccaataccaatctgatgaaatgtatgcgtaccgctgtgaagcagatgggaattcctctggaaaaagcggtaaaatgtgcagcagtcaatccggcaaaaagcatcggtatctacgacaaatatggcagcatcacaccgggaaaagtggcaaatgcagtactccttgaccaggagactctggaaatcaaaggggttatcctgaaaggacagatgctgtaaattcggagaagaaacccatgaaaacggggaacacagatctgaccggcagaagtaggcagcggagagaaaacagagagttacaggaagataaaaaacaggagcagagacggatgcgataccgttttgctcctgtttttttgtgtggcatgataagaatcaccgtttcaaatgttccctcagattatcatcttcataatcaaatacacagcgatcgtaagcattgatcacatgagtctgattatactgatcgtagcgtttttgattccgtccgtaggacatatgtacatgcccgtggataaaaaatctcgggtggtacttgtccatcagagtgttgaagacctgaaatccctggtgtgggagatccagaccatcgtttaactgataagcgggagaatgagtcagaagaatatcaaatccaccgcggtacagcagtgggaaccatagttttttgacccgttttttcatttctttttccgtatactgattaataccggggcggtaccgcatggaaccgcccagtccaagaatacgaattccttcatagacatagatctgatcttcgatacagatacatccgtccggcggtatcttttcgtacttgtcatcgtgatttccccttacatataaaaccggtgccgtggtaaatgtggcgagaaaagacagataattggggttcagatctccgcttgagagaatcagatcgatcccctcaagcttttctttctggaagtaatcccagagatacttggattcttcgtctgcaattgctaatatcctcataattaaaatacctttttgtaagctgcgctttgttgtctaaatctccgggttgtcgataccctgcagcatcactacaggttttgctttttcaatcagatcttccatctttggaatataaccgatgacattctcagccagccagtccatggtgatgatctcttccggatccataacggcgtctgcattcttctgaacaataccggactgagaatacagtacaccggagaatggattataattcatttcgcagatactcttttttaacagatcgaccagacgggcggtaccgatcggcaggtgctgggagcagatcacatcgatgatgcctgcggacataccccaccagtagttcagacctttggtggaatcgttggtgtcgtcggttttccatgccccgttcatgatgttacgaatcatctgttcatagaatttaccccagtgccagataggcatcgcaaggttcagaggcatatcttcggaatcacggtacagaccgaaatgtctggacggttctccgggaatcgtcatatcctgaccggaaatatagtggacttcgttttcggcgaaactttttgccacatcgtgatctttcagggtggaccattccaggtatactttcgcacgtggattaaccatttttgcaccaagggcgaaggcattgatgttggcagtcataccgaaaatcggatagtcggcaatataaccgatcttaccgtttttggacattgcacctgcgatagctcccatcagaaattttgcttcatacatacgtgcatagtaggtacggatatagcgatgggaggtgttcagagaacagttcaggatcttcacttccgggtgctcgatggctgccttcaggctggctttcagaagcggcggggaagtggtaaagatcaggttgttgccgtcggcgatggcttttgcaagcagatcgtcagcagtttcttctgtggcgttatcgtagcaggttgtggatatctgatcctcaaaggtctgctgcagatgcatacggccaagttcatgtgcataagtccagccggatatttcagcatttttctcgtggatgaaagccacaagaagttttggggtgctggtaggaatcagacgggcaaagaagtttttctttacttcgctttcgtcggtaggatccatctgcagttccacagattcgtcggtagtcagaagccggaactcatcccaggattttgccagctgttctttcagctccacggcagtcatattgtcgagtgaacggtagtcatacagaccgataaaataaaggaacgcatcaccggtagtaatcgggattttatcaccgccatttgccttgtattcggcacggaaacggttgtaagcagatgcaaaatccagtctgtcgtcatcgctccatgcttcatccgggcgtttgccaacgagacgttgcagtttggcaaagcttcccagttgggtgaaccagatatagttgatacgagacaaggcgtaaaagtccatgaactcataataaattttattttctttttcttccgttctcgggggaacgatacgggtaacattgcccggaatagatactgcatcgaagaactttaatacgctgacccgtttgttcccttcttccacatagaatttgttcatgaattcatatgctttgatgggttcacggatcccttcattcagatgcgccttgtacagggccatccatttgtatgcaaattctgtgttttctttcagcagaggtttgaaacctttgctgaatgcggaacttctgcctgcagttttggttcctacgatcagttcagaagggatctgaaccagtccaagaggaacctcccggacagcgacaatgtttttttcttttaatatatcatcaagattgggaagagtctcgccttctcttttgccggcgcgcatcgctttataatagtcgttttgtgcttcggccatggttgctgttattgccatagttttacctcctgtaaaaataaagtgaagctgttatctgtaaattgcactcttgtaatgatcagatagtcggaatacattgcgactcgtaactgtaagagtgtcaaacagttacgatgttttataaaaatatcgtatcatcgtgataaagagaaatcaagcggtttttgttgaggaatccaacgggagtgtggtataattacagaaatggatgtccatcgactgacatattttaagatacaacagaaaatccggatgtgagaggtgagatttatggatcaggcgtatgaaatgtttcatgaggtgttggtaaaactgttcaatgatattatgaatatcgaagcaaaagcaattataacgccggaatttagagatatcaccaataatgatatgcatgtgatcgaggcggtggggatccgggagccgaggaatatgtcttcggtagcgaaaacactggggattacggtaggaaccctgacgatatccatcaacggtctggtaaaaaaaggttatgtgcatcgggtgcgaagcgatgctgaccggagggtagtactggtttcgctgacagaaaaaggggagaaagcatatcatcaccatgagaagttccatgaagatatgatccagtcactgcttaaagacctgtcggaagaagagacgaagaccctggtatcggcacttacgaacctgcgggatttttttcaggattacaaatagatataataaaaaagagagattttgccatctatagttttgtaagaaacggcagaatctctctttttgcggataaaacgatgatttttcagacactctctagcgcatttttttgagctgctgaaccagttccagatcggaagcggttattttcaggttggtttccaatgtttcaccgttcggggtagtaatctgcattgcgatcacagaaccttctgccagtacgcctttgcgggaagcggcggcaataaattttgggaattttggatggtttgcggtaaatgtactccagagactggagaatttcatcatatctaatgggttcatcccaatggttcctccttatataaagtgttataacgttccgttttttgtgttgtggcaaaatattacagttttctcataagcatatccggattggttgcataagtcaaggcgatttcttttgaaatctttccggacttgtacagggcgagcagactgttgtccatggagatcatgtccggcttcgcagaagaatagaggattccgtcgatctgcggaatcttattgtcccggatcatattacggattgccggagttacggtcataatttcaaatgccggagcaacaccaccgtcaacagtaggaatcagctgttgggagacaactgcatttaacaccatggaaagctgtaccgcgatctggtgttgctggttaggcggaaatacatcgatgatacggtcgatggtattggctgcgccgatggtatgaagcgttgagaaaagcaggtggccggtttctgcggcggtcattgccacattgatcgtctcgtaatcacgcatttctcccagaagaatcacatccggactctgacgcagagctgcgcgcagggcagctacataactgtcagtatccacatgaatctcccgctgactgacgatactcttgttgtgacggtggagaaattccagaggatcttccagagtgataatatgtttttcctgattctggttgatctggtcaatgatacaggcaagggttgttgattttccgcttcctgcaggaccggtgatcagtgtcattccttttccgcccagaccgagattgatgatcgcatccgggattcccagcatatgataatccggaagtcggaaagtgatcacacggatcacagcagagagtgtacctctttgcttataagcactgacacgaaaacgggatacgcccgggatggcaaaagaaaagtcatcatccccgtgagaaagcagagatctcatatctctgttgtcagcaagttcataaatttcttttaagaaggcagcggtatcatccggtaaaagacgttcctcattctccatggaaaggacaccgtttttccgaagcgaaagcggacgtccggcaaccaggaaaatatcggacgcattctttgcaaccgcctgctctaacatagctcgtgcattcatatatattactcctttgataggatgtcggggtcaaaaggttaatactagtacatcgtttcgtaaataactgtatcattcgcgcaggatacggattcgagtgtgcagttaaaaaaacgtaggcgtagcgggctacgctgaggctttttaaactgtgcaatcggattcgtagacaagtgaatgatacagttatttcgaaaacgatgtactagatatagtttaaaatcaggaatctacaggagaaaacagctgatagctatcgtctccatcccagctctccgtagcttcggttgtccactgtgtgatatggtaatacccattctgacagtcggagggtgccggcagtgtcagaatcaccgaaagctgttggctcttattgacaggaacctgaaagctcagagtcccttctttttttgtaaaatcgatggtgagatcagaaattccgtccacggagcagttcttcagttgttccgttagttctttctgataaaccgaagcatcagcggattctgcgccacagtttttataggtatcagagagaatggtatcaatctggtcgagtgcctgttctgccagagaagatgcctgataatatgcctgaatccggtcagcggactgctggctgagtgtccggttatttttcgcgctggatagtgaaagcagtgcaaaggtaaacaggcaaagcaccaggaagatcatcagcagagaaggtgcacccatatggataaaagaaaaagatatttttttcttctgtttcatgatccgttcctcctttgcagatgatgtcggacaggcagctgataaaaaacatctgcctcaactccggatgtcagttttgtgacatccagctgcacatccagaagctgtccgttcagattccaggtgccggatagctgccagacagctgtttcctgagaacagggaataaaatcggaatcatagaagattgtgaaattttctgatgcaatattgaccgcatcactataagcatcttccagaagattcttcatatcatccggtgaagtggaagcaatgatcagttctgctacatctccggctcttcgggaagcctgcgtcagatcgtgagcctgggtgctgagcgtatgggattttacaaaaatctgtacgcagacagcacttgccacagaaaagaacagaatggcaaagatcagttccagaagaaaaagactggatgggttggcagttggttttcgtttcatagatgctcctttgtgattccgtaaccatcagacatcaacagatggatgatggtacagagggtaatgaaatagccatgcagtatatttaccgggaaacagaacggatggtatagactgcggttgcagtttccccggaagtatcggtacagcggaaggtgatcacctgattctccgtctcttccacagaaaattcttttacaggaaggatactctttccggcagaaggagagagtgttgtcccctcttttacatacagctctcgaagctgtccgtcccaggcgtacagataagtaaggtaggaagcgtcagccgtctcctgccgcaggactactgcctgcgtgccgtcaagctcgtccagaaaaattccgtcttcccggtcgttttgtcgcagcttttctgtcagataggaaagggcagtgccggaggtataatttctctgagaatcgtccgtcgtcgactgatagatccgtgccgccagcaggatcacagtgagagcagagatggtaaatacgaaaaatactgtgaccggaaacagaaaatcaatggcatggcgcttctgggataataatttcatcgtttatcgtcccctttctatgatcgtaacttccggataaatattggagccctgggttcggtagtccacaaaaaagagggaatcgtcatagatcaacccgtagtcttttttgatagcttccaggctttccggatagcgaccggttgttgcataacagtaggtgatatcccggttcagggcctgggtgagactttccttttgtctgcggaccgtattctctgagagagaagaagttccaagtgtaaacaacaggatcagaaaaaggaaaagcaacagagaaacccacagcttttttccgggtgttctctgcggggaggtctgaaatcgatacataagcagttcctcctgttaaataccggacataatgcccatcagaggaagcatgaccgataacagaatgataccgacgatcagagaaagtccgatgatcagggaaggctccagaaccgccagtgtgttgctgatccgggtatcgatttcttcctgatacatatctgatacctgtttcatgacctgatccatagaaccggttttttgcccgatcgatgccaggcgagcgtaggtaccggtgaggattccggaggaaaacaaagcatgagaaagatcttcgccctcatttacctgtttttggcaagcttccagctttatctgaaaatcaggatcctgattcaacatggcggcaagttctaggccgcgctccggagtcagtccgcttcgaagtgccagattcatcacatcggcaaaccggcagcccgcctgttgctgtgccatagacgaaaagaaccggaaatgtttcgcgaatctcgcaagtacagtctttcctttttccgtgcggcttccgaagaataatgcagcggcgatggcggcaagaagaattaccaaaacgacagaataacggctgatagcgttaccgatatgcatcagtgcaccggaaaatccggtcatctcggtaccgagctgaacaaatacctggttaaagatcggcatgacttttacgagaagtaccagaatgacgacaagcatcataccgatcatgatcatcgggtaagtcacagcgttgcggatgctttttgcgatgctgtcttcccgttcatagtgttcgcttagtgcggacattacctcatccagtgtgccggtttcctcaccgatttgtaccatatggacgagataagaaggaaataaaccggtttctttcagggaaagagaaaaatctgcggtttcctgcagggtatccaggatttgctgaagaatatctttttcccggtcggatgtggaatcttccagcatgatggtgatcccttccagtggtgagataccggagtgaaggatcatggccatctgagaacagaaaccggaaagctccgggttgaaaaatggctgttgttttttattcataaaaacctccctgtatcagtaggaatattttactgtgtagttgctgccgtcgccgatgtactttttcaccgaagaggcactgttgctggcggccagggtgggatccatcagggaccagtcctttccgtcaaattctatgatgttatccacccagccgacctcgtgcagatatacactgatccaggcgtgataggcttctcccgaatatcccacttccagttttgtggggatatgctgggaacgaagcagtgctgtcataagggaagcatagtcaaaacatatacctgtcccagactccattgtggcatcgggatccggaatatagccggatgccactgtttctgccttctgtttgtcgtaagtaatattttctattacatagtggtaaacctgctgtacatagtccagatcgtctgcagagtcatcagacagtgcctgcccctttttgactgctttggagtctttggtaaaccagacatactggttgggataaagatatggctgaaattcatctttcagggtaacattaaggctctgagaaaagatcagtgcatatttatcatcggtgacattttcgtagaggtctgcctgataagtgccgttgcttccggataatggaaaagtctcataacttccgtaggaatccgggttcagtgtgtaagtgtataccgtgccatccggagtggtgatctgtaactttactttggaaactttgccgttgtaacaaagcataagatagccgttttcagtgtgggaggcatccagagatgtggttttgtctccgtacacaacagtctgactggcttgcggtgtacagacatcagtgtaagtttcacgggaagttgtctttgtgtcactttttgtttcatcagcagtctgttttccgggtgaggagccggaagaacagccggagagaggaaaaagagtcagcaaaaaaagaagcaacagataaagggtacgctgttttgttatcatttgtatcgcctgtaaactcctttcctctgttatgtattcccggagtctttctgcacttttcagaaatcagatacagaaaaattccgggaggatatgatgactggttttagtatagcattttttggggaagaatgcatcaggttttatattgagtgagtatccattgtttcagaatcgggaactggcagggaccggcagagagtaccttttgatgaaaactatgaagatgaaaggtgtcaccggcaagttcacggacttcctgttgcagatcaagaaactgcagatagccaaggtaatatttcaggtaattggcgggatcttccacgatcacctggtagatctctttctgaatggtgttgtctgtaatccccagctgcgacaggaaggtggcgcagcgttcctgattccagccgttatagtggattacggtatcgagaagagacatcatacaaagattcagagagcggttaagccaggcaagctgtccgtcggtggaatcgggctgataataagtataggcaaaggattctgcataagttgcccatccttctacgtaaccacccatggccggaaggtatcggacgggatccggggcggaagaagcgaatgtgatcgtctgataaagatgccccggaaatccttcgtgcgccagagtggtatatagttccagaccactcatatttgcgtgtcggttaatgtaaatgtcattgggacttaaagtgtctatgggtggtgtcagataaaatgccggactcagatgttcctccagatccggatgcacatatttgacttcataggaggtggaaggaacagccggaaaatcggtctgtatctgtttttgcagatcttccagaatctgttcgggagaagtttcagcggcagagggtgtagaagtaaaggaaagcccggaagcagcatcgatcagcccggcagaaaatgagaatataccggagtgtgtcccggtttgcgctttggatattggaagaaatacatcctttgcgaaggtcggtgtggcagtgctgcttcccataagttttgtggcaagggagagatcggtctgaaactggtgaatcaggcgtgactggatctcaggtacggtgtcgtagataccgcagctgcttttgatcaggtattcatagtaggctttaccaccggcgaactgacagagtcctccgggattcttcccgcttcctttcagcagatacagaccatcgatcagagactgataggcaggaagtacctgaacggtgagaatctggttgtgcagtttctgataggcggcttttttttgctcagagataccggaaagagactggatcttttcggaaaagacggaggccaggtaattatcgtccgggtctttgataaatgcgctgcattgactgatgatgcggtctgcagtggcatcactcatgaaagtaccgttttgtgctttcagtttttcaaaagaaaggatgctttcgagatagctgtctacagacgtaagaagcttcaggtaattccggacatcgtcttcttttcgaaaagtgtattctgcgagaagaatggggagttgagcctgggtcccgagggagggactcagggcttcatccagaagatattgcctggcaggaagaagctgtgtttcgtagtaaagagagagaatctgctgagtcagccggttatcgggactgagatctctggcgggaaaggcatttatcatggttcgcctgttttcaaggagaatcttctgaccggagagctgtgtgggatcgaaggttccgagagagagggaataatctttgatgccggaggattcagggtaggcaagtgtgtagtgaaggttaagcggattgccggatatgtcggtggtgaagatggtgttggtacaggcgcggaagcggcggttgatgaagtaggagtaggtaagcgtgcgcaccacaagaaaggtcagaaaacagatcagaaacagaagggggatgaagaattttttggaaagtttcggattatgcataggactccatgagggcgggaattactatcagtgtatgggaatcaataccaaaatatgttatagttgtttcagacagaaaggagacgaagtgtatgtgtgagaatgtgtatgatatgattattgtaggttccggaccggcggggctgacggcggggatttatgggaaacgtgccgggttgaaggtggttatcctggagagtggttttattcagggcggtcagatcgtgaatacgtatgaggtggataattatccgggaatgccgggaatcagtggactggagctggcagaaaagctgaaggagcatgtgaccgggtttggcgtagagattgcgagagggaaggtgaaaggaatttcactggacggagaatggaagattgtgcacacaaagaaggcagattatcgtggtaaggcggttattctggcggcgggtgcagttcaccggaagctggaagttcccggtgaggaagaactggcaggaatgggagtctcttactgtgcaacctgtgacggagcgttctttaaagataagacagtggctgttgtcggcggcggggatgtggctgtggaagatgcaattttcctggcgagaggctgtaaacaggtgtatctgattcatcggagggatcagctgcgggcggcacaggtgttacaggatgcgttgaaagatttccacaatattacctgtatctgggataccacggtggaaaaaattggcggagagcagcaggtgcagtggataactctgaaacagacaaagaccgcagaagagtatcagctggatgtggatggtgtctttattgcagtgggaaccgtaccggataccgggtttgtaaaggaactggtagatttggatgagcatggatatatcaaagccggagaggatggaagaaccgatgtgtcgggtatctacgcagcgggagatatcagaaccaaggaactgcgccagattattacagcagctgcagacggggcaaactgtgtgaattctgcgcagcaggatctgtacaaaagataacagaagcggaaatgaatatggaaatcaccatgagtatgtcctatgtgaaaatactgctgagaaacctgtgaaaacagcgataaaaaggggcttttgttaaaaagtactaagttgtgtctgaaattcacacaattaaggtggatagtgaaaaagttatactccggttatccacataggaaaatactggaaatgccgtaaaatcaagttatacacaaagttatccactttatccacattttttcgtgtggacaaccgtgatttacataacgaaaaaggaaacaaatgttttgtgaataagtgataaatcgatgtttcgacaaaaagagtgtggaaaaactattgacttttttatagtcaaatagtaaaaaaaaatgcagtgaattttcaaacaatttgcgggaatttaaaaaaagaagccagggttcagcccccggctcctttcattctcttgatcactttcagtctcgtaaattcctctctctccttctcctctaacgcattactgatatcctttgtcagctgctcgtaatgaggaatcgtgatattcttcagcgcgtttgcccgcttctgcgtcttcttgatattcgctgccagccggtacgctgcattttccaccatggaaagtcggatcgtcagttccttcaccttttcaaacgcctgcttagccgcatccagagactccttcgtactgtaaaacgcatacgtcggggcatccccggaagattccgattccaccaacggaatctccgtacccatgatacttctggtcttgatacggatcgaatcctcaatgggaactgtataagaaatcgtctgtacggtattaataccgatttccatatttgccctctgcaacgctccatacgcctcacggaaggtcacatcgatctgcgactggatacccttcgcctcatcgatcaggttcatcatttcacggatcagaatatttcgcttcttatccatcaggtcaaatccctggagagaaagagccagagaattcttggcaaggatcagatttcccttggtagggaaggtatttggatccataaaatccccccttttattccatcatagactgtgcgtcagagacagcctgttccacaaggtcaatatcggttggctgatagtactgattcagaactttggtatcgatacggtcaagctcctctttcggaagcagaccaagcagcttccagccgatatccagtgtttcggtgatcgtacggttttccatcggaccctggccgacaaactcacgctcaaaggcattaccgaagatcagatactttttatccagcggagaaagctcatcttcaccgataacggaagccagtgctctggcatctcctacttttgcgtagcaggaaaacagctggtttgccacatcctgatggtcttctctggtatatcccttaccgataccatccttcatcagacgggacagagacggcagtacgttgatcggtggatagatcgcctgtccgtgaagctgtcggtccagaacgatctgaccttcggtgatatacccggtcaggtcaggaatcgggtgggtgatatcgtcgtttggcatggtcaggatcggaatctgcgtaaccgatccggtgccgccctgtacgataccggcacgctcataaagggtggccagttcactgtagaggtaacccggataacctttacgggaaggaatctcacccttggaggaagatacctctcgcatcgcctcacagaaagaagtgatatcggtgaggatgaccagaatatgcatacctttttcaaaagccagatattcggcagcggtcagtgccactttcggagtgatcagtcgctcaacgaccggatcatttgccaggttcagatacatgactacgtggtcagaaacaccgctttcctcgaaggtacggcggaagaactcagccacgtcatatttgacacccatcgccgcaaaaacgatggcgaatttttcatcggtattgtcaccaagagaagcctgctgtacgatctgtgcggcaagctggtcatggggaagaccgtttccggagaaaatcggaagcttctgtccgcggatcagggttgtcagaccgtcgatggcggagatgccggtgcggatatagttacgcggatattcacgggtgaccggatttaatggcagaccgttgatatttgcgttggtgtctgccacgatcggtcccagaccgtcgatcgggttgccgataccgtcgaaggtacgtcccaggatcttctcggaaagaccgatctccatgggatgcccggtcagacgggtgtgggtgttgtcgagagacatattgtcggatccctcaaaaacctggatcacagctttgtcttcgtagacttctacgatccgtcccagtttcttttcttttccatcgatggtaaattctacaatctcttcatatgctgcatttttgacaccctccagaactaccagaggaccattgatttcacttaagccaagatattcaattgccataattccatcctccttatccgttcttttccagtactttatcgtagaaggtatctactgcttttttataatcgtcaaacatttccggtttgtcgtttggcacatcgtatttgatggcgatgatcttttcgaaaatattgtcctctttcaggacagacataggcatccccatagttaccagggcttttgcttttttatacagatataaaatgatttccatcatcttatactgtttttccagcgggacacaggtatcatctgcgtggaatgcgttctgctgtaagaatcccagacggatcacacgggcgatctcgaggatcagtttctggtcatccggaagaacgtcactgccgatcagttttacgatttccatcaggctgctttccgtgttaagaagagccatgatctggtttctgagatcgataaagtttttatttacatgggtctggtaccatggtgccagatcgttcagatattcactgtaactggtcagccagtggatcgccgggaaatgtcgtgcataagccagcgacttgtccagtccccagaaacagcggacaaaacgtttggtgttcatcgtaaccggttcggagaaatcgccaccctgcggggatacagccccgatgatcgatacgcttccttcggttccgttaagattttccatcatgcctgctctttcatagaaggcagacagacgggaagccagataagccgggaaaccttcctctgccggcatctcttccagacggccggagagttcacggagggcttctgcccaacgggaggtagagtctgccataatagccacatcgtaacccatatcacggtaatattccgccagcgtcagaccggtgtagatggaagcctcacgggcagccaccggcatgttggaggtattcgcgatcagggccgtacgattcatcaggggatgaccggtcttcggatccaccagttctccgaattcctccagtacctgagtcatctcgtttccacgttcaccgcagccgatatagatgataatatctgcatcagaccacttggcgatctggtgctgggtcatggtttttccgctaccgaaaccaccgggaacagcggcggtgccgccttttgcgatcgggaacatggtatccaggatacgctgaccggtgatcagtggcctggatgccgggaaacgtcttttggtcggacggggaacacggatcggccatttctggcacagggagagttcctttgtggttccgtcggcaagttccagtgtgacgatcggatccacgatcgtgtaagtaccatcaggtgctactttgataacggttccctccacatccggaggaaccatggatttgtgaaggatacttgcagtttcctgggtttctgcgatgacggttccgccggtcacatgatcgccctcggagacggtcacatgaacatcccatttttttgcggtgtccagagagtcgacgctgacaccacgggtgatgtatttgccggagcgggcagcaatctcacttagcggacgctcgataccgtcgaaaatgttgttcaggattccaggtcccagtgttacggagatggcatcaccggttcccacaacttccgcgccgggtttcagaccggtggtctcctcgaagacctgtacagtggtggctttctttgacagggagatgacttcccctaccagatgctcttcacccacatgtaccatctcagacatacgaagaccagtatttcccttcaggtaaataactggtccgttgattccataaatgattccttttttattcatctgtcatacctccggcaaagacaaattcttcttttgcttccctgagtaaagtagcaaatgagttgtctatcaatatatttttggagcggatcacggcgcgcataccgcccatgaaagcttctctggatactaccggggcaaagccgaagcgtgcggcaagttccgggatccagttctggtctgcgggatcaagataaaccacaagggcatcttctccggcaaagtcgcgggcttcctggatccgctgggagagatattccagatattccggtgtggagcgaaactgtgcaagacgctccgccacatcgtgaaacagctgctgcttgatctcttcggtcttatcggaaagaagacggcggtattccagctgtctggcagagacggttttgttgatctcgcgtttgagattgtcggtttccgcctgaatatgagactgaatctgccgttctttggtctctttatgttcctggaaaatcttatccagggcttcctgatgctgtgtctgcacctgctgtgcctcctgcatggcactgtcgatggaggctgtataaaaatgctgtaatttttcttcgatagtcaatgtattcaccctctttgatttatagttacagttttagtccaatggcttcgttgacataagaggtgataaaatccggtttccggccggtaccgtgacggtcggggatctccacgatcagaggtaccttgtgatggagtttcacctcatccacaatttccgggaattctctgccgaacttttctgtaagcagaagaatcccgatttctttatcggccagagccgtttccagagcggtgcgcagttcttctctttcgtgcaccaccacaccgtccaccccggcgagccgcatgcccgtctgggtgtcgatgttgtcactgatcagatacattttcataaagcaaaacctctttgtaaggattaaagtttacctaagatcatgaaggaaatgatcagaccatacagagcaataccttctgccatggctacgaagatcatggatttaccgaacagggaaccgtcttcgctgatagcacccagggctgcacttgcagaacttgctacggcgataccggaaccgatgccggacaggccggttacgagagcggcaccgagataaccaagaccggttgcaagaccacttccggctgcgtcagtagcagcctgtacgttctgcgcaccggcgaacatggcgatggttcctacaaggagtgtgccaaagaagaagaaacagttgactgccagagactttttgtaacgttttttgtttctctcacccagaagaaatgcgcctcccgggatgatgatgctgagaatcagtgctgcggcggtaagaatttcgataatagttgacataataatatcctcctgcttatttatttttggatttttttaaaaatggctgaaaagctcttccgtttcctttatagaaacggctgaacatctcataatattccagacggagaacctggatagctacgatcaggccttccatcgcggtaacgaaaatattgccgaagatcacgatgatccagttcgggcttccggcttctgcaccggcaagcatcagtacgacttccatcatagcggcatggctgacggcgaaagcaccgatacggacgaaagaaagggtgttggacagataacttaacatgacttcaaagagttcaaaaaagctctgtacaaaatacatgcccttgcttccttcgatgacgggactttcttttttcgccattcttgccagaggctccttcagcatgatgatcactaacggaataccgaacatcacgccgagaaccgcacctgcgggaagtgtgtgacctgtcataaacaggaagatcacagcaaccagagaaccgtagaacaccagtcctgccacggcgttctggtcaaaccagatgccttccacatctttcatgcggacagcgttgatgatatggaagatcattgtaatcaggatcaggaacataccgaaagcgattgcaacgacaaataccgtatttaacgtaccaaggaacggcagattggacatcgcctccaccggacgcagccagagcgcggggatcacatcttcaaaaccgaagatgctgccgaacatcagaccgaagaaagtggagaaaatacctgcggtaccgataatggctgccagatccaacttcttaaacttatatagaagaaatccgccgatcaccaggcaggctccctgaccggcatcaccgaacatcgcaccgaagataaacatataggtcagtgccacgaagatcgtaggatccatctcgtgataggacggcagaccgtacattttcacaaacatctcaaagggacggaagatcttcggattctttaacttggtcggcggttcgccgtgtgctgtggaatacggatctgtctctacgaaacagtagagattctgatcatccgcgatttctttctgaaaagcagtggcatctgtgacagacatccagccgcacaggatataaaagacttcccggttatcctctttggtgcaggcggcaagccggcggacatcaaagttgcgggactgactttccagtttccgtgtggctgcatagagcttttcaccctgcttttgcagcagttcggcaatggtatcctgcagttttgccagctctttttctgtctgttgcaactgtccggctaactgtgcctgtacctgagacggaatgccgtaaagcttttcgggaacatccagctgttcaaaatgcatggatgcgtagactgcatcgatccggtcagtcactttggtcgggcagaaataaaagccccagatataccggtcatttttctggcaggggtaaaagagcgtctcttcactgccatacacatacgtttcaaatttgttgtaatattccctgctgatacgaccaaagcggcaggtcatatagcggaactgcagaaaacgggaaatatcaaagtcaagtgagaggaaaggttccagctgtgtcaggagttcttccagttcttttttctgatcttccagttcttttttctgttcattgattcgggtcagctgttgatcgaaggattcgatcaatgcgaccgcttcatccagtgtcatggtgagattcgtctggatgtttccggagtccaaaagcttttcatattccagtgcttttgccagaagtcctttgtagggattgatctgcagataaggagtcagtgtttttaacgtctgcagctgtgcaagagcattttccagatggatctcgtatcgggaaagatactgatccaccacccggtcaatatcggcttttggtccggtgatgcttacaaattgcattttttcaatcatagttacatcccccggtgtttttttgcttacgatttcgagatatagcgcatggtgtcttccggcgggatactgtaacggatacattcgagtaccgttgtcagccggtcgatctcatgttctttgtgatagaggtagcagtagatcgtggataccgaataaggatccgctttgctttctccggaaaggacatgcttcatgatgctgctgtacatctcttcaagcgtatgtgagttcagtttttcgtaacgtcgtccatagtaggtccggtcaagaagcgattcgaaagctgtcatcgtctcagcttctaccagagcggcgatatctttcttatgcagcttgtaattcacaggaatcagcagtgcatagatatcggcagcggtcatatggtaatactgtttggaacggtagatccactgaagattcagcagatcaaatttgttcccgtaggctttggtgatctcttccaggttccttttggagagaatcttgtcttttgtcttccatatggcagaaaaataagaaagatccagtgccatctcgtagtcaaaaagcgttggtgtttccagaccggccagtgcggccagcggctggtagtaactggttccccgcagatgactgacaaattcttcaatggaccgggacgcggtcagcaggttgatatccagctgtgagtgcttatcgaagaatggtttgaataaagaaagatccagatttacatctctgtggtcaaagatcttattcagacattctttcatgatggacacttcgtatcgtccgaaataaagattgaggaatttgcgttgctccatgttggaaaattgataaatcttggtaaaatcgcgataaatcgaattcaccagaagctgttcaatctttccacggtgcagagcctcttctgagagagagtccaggatcgcttcataagcgggctgctgtttcagataggtaactgccaggggaacgcttttgagttctgccagttcccggtactgatcgtcagtcagcagtctgctctgcatggctcggaccttcgtggtcagaccactgtaagataataatgatcccatatacttcacatcctgattattttgtggtaaatcttgtcgcataatgcatctttatgttccttataataagcatccatgtgcttaagggaacgttcggtggaggttttcaggtgttccagttcccgatccgcctgttcctgcaaagtgcgtttggcagcttccagtgctctggcagcctgagcatccgtatcgttatcataagtagaggtacgttcctcggccgcgttgtcctgacgtcgggtttcttcgacagcagattccataatacgggaagcggctgtctcgatttcagacaatttgtcgattacagattccatttttccctactcctttgtttaaaatttatcattatcatacacctattcaatcaaaaagtaaatcagaactgtctatatgtatacaaattattggaaatgtataacaaatttattcatattcatattgaaaaatagttctttccaagtatacctcttttatagtagaataaagcgcgacatagctgttttacacaagaaaatacctggagggaaatatatgaggttaaggaatatacgcggctctaaagagacgattgcagccagcgattatgtggtacaggaaccggagacacacaagggaacatgggggcagctttttggcaatgagcagccggtacagattgaagtgggaatgggaaagggacgttttatcatggatatggcgcgcctgcatccggaccgtaattttgtggggatcgagatgtatgacagtgtactgctccgtgcggtgcagaagagagaacagctcgaagaagatctgccaaacctgtattttatccgtatggatgcacgaaatctgccggatgtctttgagaaaggagaagtggataagatctatctgaatttttcggatccatggccgaaggagcgtcatgcaaaacgccgtctgacttcccgccagtttttggagcgttacgacaagatcctggcaccggagggaacggtagagttcaagaccgataaccgcccgctgtttgagttctcactggaagaagtgaaagaagcaggctgggttctggatgcttcgacttttgatcttcatcatgatgcaaagctgatggaaggaaatgtaatgaccgaatacgaagaaaaattctcccgggcgggaaacccgatccataaaatgatcattcaccgataagaagagaaaatgatccggcgcagcggaataacccgctgtggaccggattctttctccttcatatcatattataacaacagaactttgaaggatctgtgagaagatggggaaaaaatgctgttgccgcaaccgcttctacgactggagctacaacaaccccaggatcgaccgcaaactgactgatctgcacaaacgtctgtcagaactggacgatatcctgtgtgcgagaaagaaaagtgaaaaaaaacgaaaaaaattgtaaaaaaagacttgcatttttctatacggatgatataataattcttgcgttacagatacaagcgcctttagctcagctggtagagcagtagactcttaatctatttgtccagggttcgaatccctgaaggcgcacttaaagcactgttttcgatgacatggagcatcggggacggtgcttttttaatgtctgatacgaaaattcaaaatctataggtcaaaaaagaccttctgaataaacaaagaaaaggagaaaacttatgaaccgagatgtaccgttaaaaaaatacgcaaaaaaaatgaaccactcctacaccttcggcgctttcccgacgatcgaactgctgaaaaatcagccggaacatgtgctgaaagtcctgcttcacccggatatgaacagtgagactcaactggagatcatcactgatctgtgtaaccggcacaatataccgatcgaacgggccgcaaaagtggttgaaaagctcagagacaaagagaacatcttcgctgtcggtgtgtttgaaaagtacacgaaccagctggatccaacagcggatcatatcgttcttgtcaacccgagtgatatggggaatatgggaacgatcatccggacaagcatcggttttggtatcgaaaatcttgcgatcatagagccgggtgtggatgtatttaacccgaaagtagtacgggcctcgatggggtctttgtttcagttgaatttctgttatttcccaagctttgaagcttacaaagaacaggcgggtaacagaagcctttatccgtttatgctaaagggagctgtgccgttgcaggaacttcagagagacaccactgagacctactccctgatcttcggaaatgaagccaccggactgccggacagttttgcgaatgaaggccaaagtgtggtgatccgtcataccgatcatatcgattcgttaaacctggcgctggctaccggcatcggtatctacgaattcacaaaatgataaaaataactaaaaaagatataaaaaataactaaaaaaagacaggtttcgagccggaaaattttaagaaaacctggaaaaatgaaaaatagcataaaaaatacacaggattttgtgaataataaaacgactaatggtcagtttcgctaaaatacgagaaaaattgacaaaaacaaacatgaaaaataggaatgttgacaaatgaaaaattcagaagtaaaatttgtaaaacttcggatttatggagaggatataaattaagaagttttaagtgactatttagtagataatatcccacgagggtactgaacagttacgttttgcttattaaaagttaaggaaagggagggagagaaacggatttagcaagtaaattactggaagagctgaactgtgacactgcctttacgatccccctgtttggaggaattgaaatcgcagagtcggtggttgtaacctggatcattatggctgcactggtaataatttccatattacttacacgcaatctccaggtggaacctgaaaacatcagtaagcgccagttggcactggaaacagtgatcggtgtcatacaggatttcttcaaagatattcttggagaaaaaggaaaaatgtatattccttatctgatgtcggtggccatttatattggcgtagccaatctgattggtattctgggatttaaaccaccaactaaagacatgaatgtaacagcagctctggcaatcatgagcattgtattaattgaatttgccggaatccatgcaaaaggcggaaaaaagtggctgaagagttttgcagaacctacaccggtggtgttgccgatcaacatcctggaaatcttcatccgaccggtatccctttgtatgcgattattcggtaacgtactgggttccttcgttgtcatgaaactgatcgaagcagtagcccctgtactggtgcctgtaccgttgacctgttattttgatattttcgacggactgatccaggcatatgtgtttgtctttctgacagcactgtttatcaaagaagctattgagtaaacttaattggaaaagagaaaaggagaaaacattatgttagtagcaatcggagcagcagtagcagtattaacaggtatcggagcaggactgggaatcggtctggcaacaggtaaagcagtagatgcaatcgcaagacagccggaagcagaaagcaaaatcagcaaatcccttcttcttggttgtgcactggcagaggcaaccgctatttacggtttcgttatcggtctgctgatcatcttcttccttggctaatcaccattaccgaaacatgagaaaaacgagaaaggcaggtgagtaaagggtgttacggatagacttaaatctggtttggaccattatcaacgtcatcattctctaccttttactgaaaaagttcctgatcaaaccggtaactgcgatcatggataagagagagcagatggtgaaacagggtctggaaggtgccagagcccaggagagccaggcgaaggaactgaaggttaaatatgaagaagcccttgcatctgcgaaggaagaatctctccagctggttgagaaagccagaggaaatgcccaggtggaatatgaccgtattctgggtgaagcggatgaacaggcgaaaaagataaaagaagcggccagaaaggatgtggaactggatcgggaaaaagcaatgaaagagatgcagtccgaagttgcaggacttgctcttaccgcagtatcccgtatcctgcaggaaggtactgatccacagagtgacggtgcgctgtatgaacaatttttgaaaaaagcaggtgaggccaatgacacagaccgctgatcgttatggaaaagtgctttatgatctgagagttcccgcagaagatgtggaacagatgaaagcggctttgtgtgcggcgcctcagctggtgaaaattctcaatgatccgactcttaccaaagaggtaaagcatgagattatagaaacaatattcccgaagagcttacacaactttttaaagacagtcagtgaccggcgaagatgtgatcagatcgatgacatgctggaaagctacagggcctgtgtgagaaaggaaaagggaattgtggccgctacgctgtactgtgtccatgagccggatgagaatcagaaagctcagatggaacagttcgtcaggagaacctatggcgtcaatggcgtggaaatgactgttgaacagcagccggacctgatcggaggatttgttcttcgtgtgggggaccgggaatttgactggagtctgcgcggcagagtccgtcagctgcaacaacgattgatccggaggtgaaagaaatgagcacaatcagctcagaagaaattatttccattctgaaagagaaaatcgaaaattacgatgccatgtgtcaggaacaggaaaccggtaaggttatcagtgtcggtgacggaatcgcaacgatctatggaatcgatcatgcgatgtacggcgagatcgtaacttttgaaaacggcgaaaaaggaatggttcaggatatccgtcaggataccatcggatgtatcctgttcggtaaagatacaggaatcaaagaaggtacccgtgtggtacgtacgaaaaagaaagccggaatcccggtcggtgaaggatttgtcggcagagttatcaatgcgctgggtgagccgatcgacggaaagggagctgtagaagaagacgactactatccggtagaaagagaagcacctggtattattgagagaaaatctgtcagtgttcctatggagaccggtatcttgtctatcgactccatgttcccgatcggacgtggacagcgtgagctgatcatcggtgaccgtcagaccggtaagacagcgatcgcaaccgataccatcttaaaccagaaaggcaaagacgtaatctgcgtctacgttgccatcggtcagaaagcatctacgattgcaaaactggtaaatacactgaccaaacatgatgctatggattacaccatcatcgtttctgctacagccagtgactgtgcaccgttacagtacattgcaccttattcgggaaccgctatggcagaatattttatgcacaaaggaaaagacgtactgatcgtatacgatgatctgtccaaacatgcggttgcataccgtgccctgtccctgttgctggagcgttctccgggacgtgaagcttatccgggtgacgtattctatctgcattccagactgctggaacgttccagccggctgagcgatgaagaaggcggcggatctatcacagcactgccgatcatcgagacacaggcgggtgacctgtcggcctatatcccgacaaacgttatttccatcactgacggtcagatcttcctggaaagtgatctgttcttctccggtatgcgtccggccgtaaacgttggtctttccgtatcccgtgtaggtggtgcggcacagacaaaagccatgaagaaagcagcaggaagtatccgtatcgacctggcccagtaccgtgagatggaagtatttacccagttcagttccgatctggatgagacaaccaaagcgcagttacagtatggaaaatgtctgatggaactgttaaaacagccattatgtaatccgctttccatgccacagcaggttatcactctggtagctgcaacacataaagttctggtagatgtggaagtaagcaaactgaaagcattccagatggatatgctgcagtattttgcagatatgcataaagagatcatcgatgaactgaatgataaaaaagttctcaacgatgaactgacagaaaagatcgtagaagtggcagaggaattcaagaagagcaggtgttaatatggcaaatgtaaaagagatacaggaccggatcaagagtatccaggacaccatgaagatcaccaatgcgatgtacatgatctcatcatccaagatgaagaaagcaaagaaagcgctgtcagatacagagccctatttctttgagatgcagtccgcgatccgccgtatcctgcgtcatgtgccggatattgagcatgctttcttcgatgagagaccggagattccgaaaaaagaccggaagatcggtcacatcatcgtaacagcagacaaaggactggcaggtgcttataaccataacgtgatcaagatggcagaagagcagctgcagtgggaaggaaaacacagtctgtttgttcttggagaactgggtcggcagtatttttcaaagaaaacactgccggacgtgtctgtggatatggatttccactttacggttcagaagccttccatgcaccgtgcccgtatgatcgggctgcgtatggtagaggaatatctggaaggaaaactggatgagatccatgtgatctacaccaacatggaaaatgctgtgaccaatgagacacagactcttcagctgcttccgttaaagaaagcttcgttccataccgaactgaaaatgggaattccggcggatgtacatcatgaggagatcatgctggtaccgtccgcagatgaagtgttaaataccatcattccgaactatgtagtgggaacgatatacggctgtctggtagaatcctactgcagcgagcagaacgcccgtatgacagccatggatgcctcgaaccggaatgccagcgagatgctgaaagccttatcgattcagtataaccgggcaagacaggcagcgatcacccaggagatcaccgaggttatcgcaggtgcgaaagcacagaaaaacaaacacaagtagaggcaaaaatatatagagagataagagaggaggagcgaatccatatgcagacaggaaaaatcgtacaggtcatgggacctgtagtagacgtccttttcgaaggacagactctcccgtccatcaaggatgctctggaagttgacaacggtgggaaaaagtgtgtcatggaagtagcacagcacatcggaaacaatatggttcgttgtattatgctgaattccagtgaaggacttcaccgtgatatggaagtaacagctacaggcgcaggtattcaggtgccggtaggagaaaagacactgggtcgtctgttcaatgtactgggtgacaccatcgatggtggagaaagcctggagaaagaacagcactgggtaatccacagagatcccccgacctttgaggaacagagcccggttgtagagatcctggagacaggtatcaaagtaatcgaccttctggcaccctatgccaaaggtggtaagatcggtctgttcggtggtgccggtgtaggtaaaaccgtactgatccaggaactgatccgtaacatcgcaacagaacacggtggatattccatcttcaccggtgtaggagaacgttcccgtgaaggtaatgacctgtggagtgagatgaaagcatccggtgtactggagaaaaccgctttggtatttggacagatgaacgagccaccgggatcccgtatgcgtgtagcagagacgggtctgaccatggcagaatatttccgtgatgaagaacatcagaacgtgcttctgtttattgataacattttccgttttgtacaggcaggttccgaggtatccgcactgcttggccgtatgccttccgcagtaggttaccagccgactctggcaaatgaaatgggtgaactgcaggagagaatcgcttccacaaagaacggttccgtaacttccgtacaggctgtttatgtgcctgccgatgacctgacagacccggctccggcgactaccttcgcccatctggatgccactacggtactttcccgtaagatcgtagaacagggtatctatccggcagtagatccgctggaatcttcttcccgtattctggaagcggatgtggtaggagaagaacactaccgtgttgcacgtaaagtacaggaaatcctgcaaaaatacaaagaactgcaggatatcatcgcgatccttggtatggaagaactgtcagaagacgataaactgaccgtattccgtgcaagaaagatccagcgtttcctgtcccagccgttccacgtagcagaaacctttaccggtgttcccggaaaatacgtgccgctggctgagaccatccgcggttttaaagcaatcgttgacggtgagatggatgaatatccggaatgggcattctttaatgtaggaaccatcgatgatgttatcgagaaagcaaagtcacaggaggcttaagataaggaggtaccggcatgagtggattttatatgcgagttcttgccagtgaccatgtattttaccagggaagggtagaagcagtgactctcccgggtgatgatggtgaacgtaccgtactggcccatcatgcagacagtatcatttccatcagagagggcgaacttcgtttccgcgatgaggaaggaaactggcatgaggcgatcgtaggtctgggctttgcagagatgatcaataaccgtctgaccattctggtagacaccgcagaacgcccggaagacatcgaccggaagcgtgcggaagaagcgaaagcaagagccgaggagcagcttcgtcagaagcagagcatgcaggaatactacatgtccaaagcatccctcgcccgtgcgatgaccagactgagtgcgacgaacaaaaagaatattgtataaaccagaacccggcagcttgcggacagaaatattcgtaagctgccgggttattttttcctgtcttattacaaatagactgtaaaaaatgtcatatttcaaagttgatccacaaaatcagatataatcaaagaaatactccagagcatgtctgaaaaaggcttttcgcgagttgcgagtcccagtttgcggaaatgatttttcaggcacgctctagcaacagaggcgaacagtggatgaaaagaaatgtggcatacataaaaatagcagtctgcgcgcaggatccttatatcgggaatcagatccgggaatatgcggcaggttttgagataagaggaaatgttgagatagaagtggaagtaatgaaaaactgctatccactggcgaaaaagattctgcgccgggaatactatgatattatttgtcttgggagaaaactgtgggatattgacagctataccttagcttccagcatccgtacgacagacagggaaaccatatttttccttctgggctggaaccggctgacaccggaccagacacagaacatcgcaccgatatcgcatcttcatctgccattgcagaaagacgaattccgaaaagaactctaccgcgcgctcagccatctgggaccggggcatcgctatctttcttttgccgtacaggaggagaaaggacgtattctgtatcgtgatatcaaatatattcgaaaaagtggcagttccgtggtcattgataccatgaaaaaatcatacaggatccctgttacaatgacagatatggagcaggagcttaccgggatccaggagagatttatcagagttcacagagattatctggttaacagccgctacctgtcctggttctggaatcaggaagccggcctgatggacggaacccgcataccggtgagccggatctataaggagcgagtggaacgggttgtgggagagaaaaggaaaaagattatgagatagagaaaaagagaacaggcagccctgccggaaggaagcatgactttccggtgggactgttttatgttacaggtaacaaagatatatatagaaaaaatatagaattgtccgtaggcatgtgttactataaaatatatgaccaaacggaggaaaaaggaatgaaaatagctgtatgtgatgacgacaggcttttgacaggagaaatcgacagccaattacagaaaatccgtgaaaaaacgggtatttcttttgaaacagatatattttttgatggtgagacactatggaaagcaatcgagcaaaacggctcctatgatgtagtttatctggatatcgagatgaaaaatatggatgggattaccgtggcaagaaagatccgggagcgcgatccatatgccattctgatctttatatccagttatgacagctattacgaacagttgtttgaagtcgaaccattgcgcttcctccacaaaccgatagatccggaaaaattcgatgaatatttcctggttgcatatacgaaactgaccagcctcgaggatcgcctgcactttgaattcaacaaacgattgtaccagattccctaccgcgatatcgtttatatggagagtagaagaagagtcattcatctgtttggaagaaacggagaagaatatcgtttttataaaaaaatgaaggatctcctggaagaaatcagccataccggaaatatgtttatccgtgtacactgttcctatgtggtgaactattactacatcaaatccctcagctccaccgaggcagaactcctgacaggagaaaaacttccggtgagcggggaatataagaatgaggcgttaaagaagtttatggggatgatggaatgagttccgtactgtggagttttatgaattgtctggcagttgtttttgtaaaagaagattttctgtctacgtttttaaagcgcaaaaagaatcgttggatctttatatgcgtatggatgttctattttctgtttcattttatgacaaaagtagaaaactatatcataaacctgatacaagatgcaactgtgacagcaattgtatgctggctggggtatgaggcggctctgaggataaagattctgattgcggtgttgtcggtggcaataggagcattgtcagaagaaatcatagttgtattgctcataaatataaaaggaagcattgatggaaatattatgctgtattccctgatgggtaaaattattttctggttatgtacacgggttctatcgatgatttataaaggaaaaatggaggcaatagaacaacaacgcagatatggaaatctgttactgctaacggcaggaagcaccctgatatcaaattatatcatatttttgataagcaacagtgttcagaacaacaccgtacagatgtggttgctgatatctgtttttataatattgttattggatattatcgtgtttaaagtatatgcgatgcataaaatgcagttggatgtagaacgcgaaaacagagaatacgcctatcaggtacagtattatgataaacagatcaaagatcgccaggcaatgattcaggaagtccgcagaacccggcatgatatgaaaaataacatgatctatctgaaagaactgttaaatacagacgcggaaaaagccagggaatttttagatgaatacattggacaaagtgaagctacggatgaaatctcaaaaagtgaaaatctggcagtggatgcactgattaactataaaaatatgacagccagagaaaaaggaatcaccatccacctggaaagccagataccggcggaactgccgtatgaatctacagatctgagcatcattctgggaaatctgttggacaatgcgattgaagcgacggagaaacttgaagttgaaaaagatatctttgtgagtctgatgtaccggaaagaaaagctgcttatcaaagttcgaaacccatacacaggtgatctcaaaaaagatcgcgcagggaattacatatcagaaaagaaggatcgtgagaatcacgggatcgggttgaaatcggtgcggaaagtggtggaaaagtatgaaggtgttatggaaattcatacagaggaccagatttttgaaatatgtgtgattatatagaccgctgaaaggcgaagattataaacaaaaaggggaggatagaaatatagataaactattgtgggatattattgctgtctcgacactagttattacgatggaggattttttttctacatttttaagaaagaaaattgaaaaatggaagtatgtaagtatatggttgttcttttttttcttccatatgactgttatgaaaaaaatggatggatatttagaaaatatattaggaaatctaattgccttaagtattatttgttggtttgcgtatcaggaaatttttgcaataaaggaaatgatgattttttagcaatagcattgagtgcaatatcggaaggaattgtagcagcgatcttaataataataaaagggaacataaacgggaatacaatgttatattccataatatcaaaaatcatattttggtgtataattcgcattttatcaattctgtataaaggaaaaatagagacggttcgtaaaaaatcatatgggatatttttaacggttgcggtagttgcaaatagtagttcattactaggcattttaaaagtaacagaagagacatctggtgggatgctgcaaacattgtttatattcatagcgttcgtattattaatatccgatataagcgcttttaagctgtacgtgatgtaccaagaacaaagtgagatgaggcgggtgaaacaggagtatgctaatcaattgattatgtatgataagcatttgagtgaaaaacaaatggttatagatgaagtccgaagagtaaaacatgacatgaaaaataatatgatttatttgcaaaatttattaaaagcagatccggaagaagcagaaaaatacctggaaaaattcataggaaagacaacaaaaaagacagatgagttttcgaaaagtggaaatttctctatagattcgatgcttaattataaaaatatgattgcaaaaagtaaaggtcttagtcttattttagaagaacagataccgatcaatctcccatatgaaaattcagatctctgtgtgatactgggaaatctgctggataatgccatagaagcggcagaaaacagtgaaaacaaggaaatagatgtacgaatagtatatgccaaaaacaaactgaaaataacggttaagaattactataccggaaagataaagaaagacacgggcgggaatttcatcagcacaaaaagtgacacgaaaaatcatggaataggactacaatctgtaacccggatcgtagaggcttatggtggagttatggaagtgttgacggagcgttcgatttttcaggtgaatattttaatgtaaaatattgagaattaaagcattggtgggaacgattaagtagtgatttgtctgttgattttgtggagaagtttttgagattaaaacacttctttctaatttgaaaattaataagagacaaatagcgactaaagaggaaaagggaaatgtataatgttttagtggatattgtagcagacgtatcaactgcgattacaatggaggatttttttaatacctttttaacgaaaaaaatgatcggatgaaatacatatcgatatggtttagcttttttttgtttcactttatcgtgttaaaaaatacaaagggttacttgggaaattttctgcttaattttgtggcattaagtgtaatctgctggctggcttatcaggaaaatataaaaacacgaattatgatgatcattgtagatatctctcttggagcaatatcagaggctgtaattgcagcattgttaattctgctcaaaggaaatattgatggagatatgaaactgtatgcaatgatgagcaaaataattttctggatctgtgtaagaatattatcgtttttgtctaaaggaaaagtagaggttaccgataaaaatttttatgcgctaatcctgacaatcgcagcaggcattaatatcatatgggttattttgcttcttaaaatttctgaaagaagtgttgatggggatatcagaagtgggatattgttattagtttttgtgatattgtttttagatattattgtatttaaattgtatatcttatatcaggaacataaaagaaccgagcagaaaaaaatagagtatgagcatcaattggaaatatatgatgaacagatgaataaaaaaaggaaagatatggaggaagtcagacggacaaaacacgatataaaaaataatatgatttatttgcaggaattattacgcctaaagccacaagaagcagaaaaatacctgagagagtatatgggggatgtaatggaaggcaaagatgaaatttcaaaaagtgggaactttccggtagatgcgttgcttaattataagaactccattgcaaaaaagaaaaacgtaaagatcagattagaacagagtatcccgataacgttaccttataaatcatcggatatatgttctatactgggaaatctgctggataatgctatagaagcggcggaaaacagtgaaaacaaagatatagatgtacgaatagtatatgtcaaaaacaagctgaaaataacagttaagaattattataccggaaagataaagaaagacacgaatggaaattttatcagcacaaaaggcgatacgaaaaatcatgggataggattaaaatccgtaattcaaactgtaaattcttacgatggatatatcgaagtgctgacggagcattcggtttttcaggtggatattttgatgtgatttaagttgcttttgagtgatagaattataaaattctttggttacatggaaggtttaagaaagatatacggtgtagaggaatattgcgatgaataaagtattatgggatgctatggcagcttcggcaataacaattacgatggaagatttcttttctacttttttaaaaaagaaaacaacgaaacggaactatgtggctatgtggttgttttattttatatatcacatgacaatcatgaatatattaaatggatacgtaggaaattttgttggaaatgtaatagctttaagtattgtttgctgggtttcttatcaaagtagttttgcgataaatgcaatgatgacttttgtggcgatatcgttgagtggaatagcagaaggattgattgcgatagcggtaataatgattacaggaagtattaacggaaatatcagattatatgcattaattgctaagattatattttggatgattattcgagttttagcattcctttataaagggaaagtggaaaaatctcagagaaaaatatatggaattattttatcagaatctgtaatagccaatgctgtttttctggctgctactatagaattaacagaaatacgagcagattctatgatcagggcatgggcagctgtttttgtatttgtactattactttttgatatcgttatgttcaaagtgtatgtcatgtatcaggaacaaaaccagatgaagcgtatgaagcaagaagctatgaatcagcttgaaatttatgacagacaaatccatgagaagcaaaaagttatggatgaagtgagaaaaacaaaacatgatatgaaaaacaatatgatttatttgcaaaatttattaaaagcaaatccggaagaagcagaaaaatacctggaaaaattcataggaaagacaacaaaaaagacagatgagttttcgaaaagtggaaatttctctatagattcgatgcttaattataaaaatatgattgcaaaaagtaaaggtcttagtcttattttagaagaacagacaccgatcaatctcccatatgaaaattcagatctctgtgtaatactgggaaatctgctggataatgccatagaagcggcggaaaacagtgaaaacaaggaaatagatgtacgaatagtatatgtcaagaacaaactgaaaataacggttaagaattactataccggaaagataaagaaagacacaggcggaaatttcatcagcacaaaaagtgacacgaaaaatcatggaataggactgcaatctgtaaccaggatcgtagatgcttatggtggcgttatggaagtgcggacggatcattcggttttccaggtggatattataatataaaaaaatacagtttattttctgatatgggacaaagatatattatcatcaggctcctgatctaattgttgcatttagattgcattttatgccgaattgttacgagttataacagaagatgctacaatttgataagaaatgttagtttgcaatacagaatatttaagtttcaattacgtttttgaaagtctattgactttgaaaagaacgggaactataatccgcttaaatactttgatatgcaaattattcagaaggaaggcgggtaaagcgccggagcaggggagagaaaaccggtagatacggaggggttgaacctgctggacaatgtggttggccataaggagagtatggcggaaatggaggagtctatgaagaaaaaaaatgtgatcgtagcgattgtgatggcaagtatgatcatgggcggctgtggacaaaagacggcgaccagtgtgatcgaggatccggcggtatcggaagcgccgacgaaggaggatacactggaaccggaagagtcagcagaggatgcgacgcaaagcgcagaggaatcacaggaagctacagacagttcttcaacaagcagcaatgcaacgaaggaaagtaacaaggcgacagagagtaatacagcatcgggtagcagcaatacttccggcgaaggaaatacagcaacggacaatagcggttcgacaaataacaatacggcttcatctgccgggaaggatacacagaccgtatcggaaagtacagaggatacgcagcctactggagttcagacaaaatataagatgtatgatggagtatattttgacgaggtgatttatacctggtccatggatgacagtcaggtaagaccatattgtgaaattaatgtttcaaatgcaacagacacatcgtttgatttcacaatttatgatgtagacggacaaaatcgcagcctgaagtttaaaacacatacagcagtatttacgggagatggaacacaggcggaatataatggaaatggatatcatctggtattcacgttcccggatgaccgaggagcacttccggatgttgtatgtatgcaggtgtccggtttaaaggatatgggcggctgtatgtatgtgaacaatactgtcccgggacatgaattcggctgacagcatttgaaagcgtttgaaaaatcaaaaggagcaagtataaataagggttaaaaattgtaaaaagaccatgatgagtaagagcatacaaaagtattagacggcaaaggagaggggagaaactccggcgccggaaagtccgggcagcagatccagggggaatggatctgctgcccggattttgcctcataataacgggaaaaataaaaacaattatgtgtagaataaggattttacaaaatatactttccatatggacggttttgtgggataatgagaaaaagagcgcacataaaaacatcttttatcatagagaggaggatacagatttatgagaaaaagaatatggtttgcatgtctgcttgcgatgagcatgacatttgctgcatgtggttccaaagcatctacagaggtagagcaggaagatgctgcgactgtacaggaggataccacggaagcggaagaagataccacagaggaagaagataccacagaggaagaaaatacagaggcaattacacctgaggagtctcaggaggaaacagaggaagtacaggatccgaccgtgacagcggctcctgaagatgaggaagcacaaaaaaatgatacagtgcaggaagctccgcaggatgtaacaccggtgaatgcacagtatcaggtgtatgcaggaacatattatgacatgaatatctatgaggcaactgcagaaggtggagagagcgattcttattgtcagatcgaagtgtcaaatattacagatcagacctttgattttgctgtatatcagctgacagacggtaacaaacagatgattctggataccagaacggctacgtttgtggaagatggaacaaaggctgtatccgaaaaagacggaacgaaccttgtatttacattcccggataactggaatgctctgccgaaggttgtagagatgcaggtgagcggcatggatgttctggaaggaaattcctatgtgaacaataacgttccgggatatgaatttggctgatcataaagaataagtgaagaatcaaaactggtccaccggatcggttattgatatgcagtgcaataaaaatgcctgaacgtctggtgtaaatcaagcgttcaggcattttattgtgtggtatattatgcagagactagagcatgtctgaaaaaggcttttcgtgagctgtgagtcccagtttgtgggagattttatccgaatgagggcggcgtagcgggctacggcaaccgaatgagggtaaaatataccgcaaactggggcttgcagattgcggaaatgatttttcagacacgctctagctcaggcttcgtggacaataatatccgcaaactgtgcccgggttacttccgccagttcttttggatccaggcagatggtagtaccgattcggccgccactgacatagattttatcgaagttttctgcactgttatggatgaaggtagggaagagtttcttcattcccagcggactgcagccgccccggacatagccggtgatttttgtgatttcttttaccggaatcagttccacggacttttcgccggctactttggcagcctgttttaactgaacttcctcagcgatgggaaccacaaaaacataatattgtttgctctttccctgtgccaccagtgtcttgaaagactgctctacaggtgcacctgttttttctgcggtatgaagaccgtcgataaattcatcacattcgtattgaatcatgtcgtaccggatatggtgtttgtccagcatacgcatggcatttgtttttacttctttgctcatgttcatcacctcaacaggattatacacattttttttcttcagggcaatatccactgaaattttcccgtcaattttagcaacttttgacaaaaagaagaaaatcagaaaaatacactggacaaatctaaagagtgtggatataatgagcccataacaaatccagatgcagcggttcagctgcagatttccaaaatataagtttaacaaaatatagacaagtggagactactatgagtttttctatgcttttttgcattgtatttaccatgggagcagtgtttttcgactgtgagtgggagaaagttcccaatctgtggattatagccgggcttcagatcagtatggcggagcatctgtccggagaggtgatacaggggcttggcagtgcggtcattcgcttctggggaggaatatttctggttctttttcttttctttcctttgtttctggggaagatgatcggaaccggagatataaaggtgctggcggtactcggcagcgtactgggaccccggaaaatattgttctgcatcgtgacggcatttcttctgggtgccgtggaatccctttttcttcttttttttcgctgtgactggcggcagcggttcttatatttctttcagtatcttcagcgggcatacgttgaacgatcacttccaccgtatctggtgccggggaaaagaccggaaaatattcattttacaataccaattttaggcagcgtgctgctgttgtatctaggaggataaggatgagcgaacgcaatatttttgcagtgtgtgatctggatgtggattacgcctatcattttatggagtatctgagcaaaaagaaaaatatcccttttgaagtgcgggtattcaccagtgccgcaggtttccgggaatatgtaaaggagcatccggtagagctgcttttgatttccgaaaaggcgatgaacagtgagatccgtgaggcgaagatcgggcagattctgatcttatcggatggagtggtgtcaaaggggtatgaagagtatccgtcaatttacaaatatcagtcttccaatcaggtgatccgggaagcgttggaacactatggggagggtgttggaacaacagcgcagacgctgaagctggagaagaaaaaaatggaagtgatcggagtgtattcaccggttggcagaacgatgaagacaacatttgcactgacgctggggcagatcctggcaaagaaaagagcctgcctgtatctgaacctggaagcctgttccggttttgaatatcttctggaacgcagcttcgatcagacacttggcgatctgctgtactatcagcgtctgggatcggaacagctgatcacgaagatgggatctattgtacagagtgtcaacaatctggattatctgccgccggtactttccatggaggatatccagagtaccacggcacaggagtggatcagtcttctgcagcagattattgattacagtaattatgatgtggtcattctggatctcagtgacagtgtcagtcagctttataaagtactggaacagtgtaccagaatctatatgccgatccgggcagatccggtttcgcaggcgaagattcatcagtttgagcacacattgcaggtctgggagaaacagatggtgctggatcggatccgaaagattaaacttccctatcaccgcagctccaaaaccgggatcggatatatggatgatctggtatggagtgaactgggtgattatgtgagagaaatgcttcggacagagagggaggacgggtaatgaagcaggaacaatttatccgtatacgggtaaagctgatggagcagctgcggcagggcgcagaatggtcggatgaagaaattctggaaaggatcgatcttcttgtatcggagacggcaagagagaaccgcctgacggtgaagcagagagaggagatccgaagagagttgttctattcggtgcgaaagctggatatcctgcaggaacttctggacgatgaccgggtgacggagattatggtaaatggctatcagaatattttcgtggagcgggaagggaaaaagagcagatgggaaaagtcatttgtgtcaaaggaaaaactggaggatgtggtacagcagattgccggaaaatgtaaccgcgtgatcaatgaaaattcccctattgtagatgccaggctggaaaacggatcccgtgtgaatgcggtgatttatccggtggcgctggatggaccgattctgacgattcgacgttttccggagcatgcgatcacgatggaagatctgatcgcgaaagaaagtatcacaagagaggcggcaacatttctggaacagatggtaaaagcaggatattcgatcctgatcggcggagggacttcctccggtaaaacgacatttctgaatgcgttatccaacgcgattccccatgaagaacgaattatcacaattgaagattcggcagaactgcagatccagggcgtggaaaatctggttcgtctggaagcaaagcctgccaatatggaaggaaaccgggctattacgatccgggatctgatccgtacagcccttcgtatggcacccaacagaatcattgtgggtgagattcgcggtgaggaggcagtggatcttttgcaggcctttatatgtactatataataattatatatataacgtatataaggatggaaaatatagattagagggaggggcataggaacgatatgaacattaagtataggttattgtgtaaaaggttaatagaggaaaggaagagagtaggtgtcattcaatattataatgtactgttcataatggagttagtgtcagataaagacatatgggctttagaacagtggatgaatggtataaataacatatatatgaaagatatacataattggtgtagaatacattttgttaaatatcacactgtatttgtttacaggaaagagtatccggtaaaagcaaatatttggaatgggtattcatatacaaggtggcggatggagcggatgatgaatttgggataagataaaatagtgactgcatgaaagagagccttaaagcagggtgttcttttgaaagtatggatagaataaaggctgaaggctctgcgctattcgtttggcagagcctgagtattctcctgatccgtagaaaataaatctaactgaccttctggagtggaactttgaccggattcatcttcagttgattgttctctttttttgggtgttttatgagtgtataatttctcaaaaggaagtgaatacttggattttttattgtattctagtaaaagagcttctgcgaatcctaatgaaccggcacgacgttctctggcagtacgactgatttctctgacagagacacgcccaactttttctttaaatgtgtcatctttcattgtttctccataagcattatccagacgggcaatagcattaagcatattggaactaaaggacataggcgcaccttcccatgtggcaacacaaagacgtaaaacacgatcaagagtgtgaaaaccatatttttcatagatattaattaaagtggatacagcacatatacctccggggcgagaggaagaagtaatagtgagatcatatgattcaacaaggtcacgaataataagttctctatcattaccagcttcaatattagccatgaatatttcataaggtaataatgatttgacatatttcatctgatttgcaaaaatatctgcttcttgggtgtaaacaagatcatcataaaccatacaccagacaggagtttctcttgatccagagacgagagcaacaatctctatagtgtgttgtccgttgaacacataatttatcccatcacgtctacttacttttacagggtttatctgataaaggtcaaaattagctgcagcacgctgaacgtgtttgatggaaagattacgttggtaatcttgatttgaacataaatttttaataggtatttgctcaaaatgcacttggggaacaaacttttgtaaatcttcggtatttccatccataattatatttcctccaatttttttaaaatattatttgtggttgatattaggcacataagctgatatttaagcttgtattttgctgtatcagatgcaattttaaaatctgaaacttttaatactctttcgatagaactgttccacgagggaatcgtcaacgtaagacttgcaatttccgcatctggatcaaattgtggcaggttgcgtattgaaggaatagaaacggaagattctttctttaacatcggtttggcgtaattattccacagtaattcccttttcatatcatgataactgagatgttctatcttttcggcaagaaggtagttatttagacttaaaagctgctcttttgataatcctgaaagctcaataatattagcttgggaaatccagagctgaccagaacgaactcgtttgacaagatccggaactttttcatcaattatatctagtgcactactgtaagcagaatatttgtaaacggtagccattgctacattacattcttcggatattttttttgctgcgatgcttgcaccggaaatatgagatttatttgtagatgaaagttgtcttgaaactaaaattttttcagcatcatattttttcccaatcaggtattttttattgatattggttaaatcctctcgtttaagttggtcagtacatatccatgaaattacatcttctttactggaaaaatgtagtctttttattcggaaaggaatactgtgtttacgaaataattcatatgcttctataccattaatgacaataccattccatgtgcagatgggggtgtgataggaataacataatatctgttgttcaagttgtttataatctttttcactgagatattgatacaaattggtgaattctagttttgtttttaatgtatatatactataattgcgcatactcatctcccattatttctgatttgaattctgtttgtggcagttttgtgatgatgttatccatggaaaatagagctatttttttatctgggtaaatattgccttctaaacgaaaaatgttaaatttctcccaagaaaggttaagttgggaaagtgaatatagtaattctcggctgtacaattcataactgttaccattgatgacaaaataatccttaactttatgtgccaatttatcctccgcacaactagcttttatacctatcattttttgatcaggattaacaagaagttgaatatattctgggttaccaatttgacggagtgtattgcggtggattcgtatacgattctttttaaagtcaatacatattagtggatgggaagagtgtttgttgttcataggatttttcctcactttctgctgttgatggttcttttgctttttctatggatttatcagttgccttcttcttttcttgtatgtcaaatactgcgtagccttcaaatatattgacttgcattgatttttgatgttcttccactggaataccgaactgattcttccattcttcaggataagaaggtgtcctagcagtggttacagttccattgtcttttagtgtacgaggaaatatttcaggtgaagttaaatcgaaaatgaacagtatttcattgccagaacgaattagtttgccgagaatcttgtaccgataattaggattccagtccatgagagatatcactttagcaaagaaaattcgacaggtgatttgttttggcgaacgtttttttccagaggaacaccaacgaaaagagtctttttcttcttctcgacagggacggacagccagttttttttcaatgggattgactaatatttgcacatattcgacatcgggtagtttttttatgcaggcggtatttacagataccttgtagttattaaacgtaaacgaaggttcgtaaatatgagcgaagaattcgccacgtacaacttgataaccgtcatagctgaaagaatcatcgtcaatgacttccgtttgatttgaggggctgggtgcgactgttattggcataggtgtgttgattttcatcatatcagaaggttctgtagtcatattccattgatttataggttgctcgctcattgggtgtctcctttaatttctgtaataatattctttatattttgtataatggtttctttgggagtggtttgtagctcgggttctttataaggtttactttctgaagcagtctgccagtttttgtctgctgtaaattctgttaattctggcgcttgagactgagtatagtaattattaccgaagctattcatccagtcggcaggataagctaacacactcttagaatcagatattgtatcaggcatgttgttattgggggcggatacgtcgttggtacttgtcggtattcgtatttctgtatcgtccatgttgaaaataaggacattttcattgtctttttggtgggcaactcctaatattctatatttgcattttttgtcccatttaaatatctcgtataatgttggcaaaaatgcagcgccggaaattggttttggaataagttgaccatctttgagacgtgaccactgcactttattttttgtttcagaggaacatggtcggatagcaagtagttttgagcttgggtgtattagcagttcgacaaattttatgtttggaaatttccgtatagcatctttgttaaaagagatctgtttatatgaaaaagaaacagaaatccgaccaacagaggagaaaaattgtcctctggcaacttcatagtctcttaaatcgaaggaaccggcggaagcagtaattgtatcaggtacattcatatttgccggtttaaggacgctttgagatgcttcaaagtagtctctggctttaaatccagaccatcttggattaatgcttataaatccacttagagagccttcttgtatcacatgtaattctggtaaaatctctttatttccatatttcgcatttgtaattaatttttgaacagctatgaaatcatctcgggagataatagcttcgtgatgtccgacttttctgtattgattacggtcttgattgtttttccttgatttatggtcaagataattaggagtccatgtttttctcgccagaacatccccacaatggcgttcattttgaaggatttgtagtatggtactggatgaccagacatcattattcttttttgttttacaaccgagttctgtcaaagaatcagcaatttgttgagtactgcttccattcagatacatataaaaaataagctgcacaattttagcttcatgtggattgattacaagatctccattttcgtcttggtcatatccgagcagaggaggtgtaaggaatattccccgacgaaaacgcatttcaatggaagaattcataatttcacttttggtatgactttcttcctgtgcaagtgttgacatgaatgacagaatcatttcgcttttgggatcaagagtatttaaatgctctgtttcaaaaaatacaccgacgggtggacggagtgaagaaagctctcgtacatatcggatacagtcaacaacgtttcttgcaaatcgggatacactttttgttatgattaaatcaatttttccggcttcacaatcttcaatcatttttttgaatgcatctctatgttgaagcgaagtgcctgaaatgccttcgtcggcatatatttcgacaagcatccaattcggatttttatttactacatcctgataatgatttttctgtaattcatatgaggatgtttggcgtggatcatccgtagatacccttgcatatacagctactcgtagttttttttctgttttaaaaatatcctctggtggaagtgccggaattacttccagttcttctggatcaatacctttgtatctttgccggattctggctttctgttcatcaatattactgcttcgttcttcactttctttcatcaatagcgacatcctttatagttgatataactatcatagaatttttggattgaaaaagacataaaccatcagttaagtgattaacggatggtttatgtagaaatagatatttgattgttattgaatgatttaataatcattcgggttatcagcatcgtaattgtgttttgaggatagatgccaatcattgattcgtaaaatattctttatggctgaaagaacctcgaatatgtaacgtttttcagtgctggtacaatctgccattaataaatcgatatcagtttgatattccgtaggattgtataacaagtttccatagagtaattcatcaatagtaatttcaagggcattgctaattttgattaaagattctaaactgggtttacgcttggcattttctatatagcttatataaacagtagaaagatcagcgatttcagccagctcctcggcagacaatcctcgttgtttgcgggtttctcttatacgtttgcctataagtgcataatttatttccatgtcctcacctcctttccatcacaacttgacttttttgtgttgtagatagaaaaaaatggtgagctatacaatagtaattggttgtataaaaagaagtatatcatatgtatatagcaaaaagaagattgtcgattgatgggagaaaaaggcgataagttataattgaacaacagtgaaaaaaaggttattatttatgtattaaaaattatgtctgagaggaaaatacatggcagataaagaggaaattaaaacactggaggaattagaggaaaaaggaagaatactgcgggggtacaaagaaaaattccggcagatgtgccaagaaaataaaatgataaagggttcgacagtgctgaaactatatgataaaattgaagaggtacaaagagaatatgagcatttagataataagctgacattaatggaatacaactttatatagttctattttttttgttttaatactactgtttcccttagtaaatacttgtaagatacatctctaatatttttgcggatttctagttacaattaaggtaactactatcggaaagaggtgtatttacttgcgtacagaggattatattgcggacaatattatagctttatgtaaaaaacgtgatatgagtaaatatcggctgtcacaattgactggtatatctcaatcttcgattggaaaaattattgctaaagaaagtttaccaaccatgcctactgtagaaaagatatgtgatgcactgggagtaacaatggcacaattctttgccggaatggatgttccagtaagcttatcagaatcacaacaagaggttctgaatatttggaataatcttgatgaaaaagaacagaatgtagtgatacaaatgctccggggacttcaaaaataaaggaaacagttgtaacgaaaatgttgactgtttctttttttatggagttgggagattatggtgattgaaaagaaatattatgatattgcacagcgtgaattggaagaaatgcaaagagaaattaatgaagaaaaagcgcaaatgtcagaagaagagatactagaggataaaaaatggcatgatgaacaattggaaacaattattaaaaaggcagaagctcatatgcgtcgttttaagaaagttccagatcctcaaaaagtagtgaagttcacttttttacaaaaagatgcattggaaattgcacgaaatatgcagatgaatataaaaactgagcgtaaagaagatgatttatgggggacgatagaaatgtcatttaataatatgtggtttttagattcagctcctagtgaatggaaagatatttggaataacttgatgaaagaagctcagagagtgtatatagaagcaaaagataacatgatcatgtatcaatattattatgatttgacggtagaagttccttgtgtgcagacacaatacaaataatgatatatgaatgctgttctgtaataattttatgatatactgtggatatgatatgtaaaaatagtcggagaaagatttgtgaatgcacgattatttaggaggaaaaaagcatgacagacgctgaaaaaagagaagcggctcaccagtttatcaatagatggatgggacgtggcaatgaggatgaagatggtcgttcttattggctggaatttttatccaatgtaatggggatggaaaatcccacagagcgtgtaaattttgagaagaaagtaatcgtaaatgggaatacaaagcggattgacgtatatatcccggaaacacatgtcatcattgaacagaaaagtctgggaaagtcacttgatcagaaaatacataactctggagatgtggatttaacaccatatgaacaggcgaaacgctataatgacaatcttccgtatgatgaaaaagcaagatggatcataacttgtaatttttcggatatttggatatatgatatgaatgccagggtaccggaacctgttaaaatagcgttggttgaattgcagagcaagtatctgctccttgattttctggtaaagcaggatgtaaaaaagttatctcatgagatggaagtttctattaaggctggcgatattgttggtctgatttatgatgctttcctgaagcaatacaagataccggacggaaatgaaaaacaggaatcagcagaacagaaagaaaaaagggaacataagttgaagagcttgaacgctctttgtgtgcgtttagtattctgtctgtacgcagaggatgctggcatatttggtgaacatcgggatatttttcatgattacttagaagcatatgatgtaaaagattgccggagagcattgattgaactgtttaagacgctggatactccaatcgctgaacgggatgaatatcttgaagaagatgttgcacaatttccatatgtaaatggtggtctgtttgcagatgaaacaatagaaatcccaccttttacagaagaaatcaaagacctgcttttgacgaaagcatctgaggattttgactggagtgatatttcaccgactatttttggagcagtttttgaatctactttaaatccggaaacaagaagatctggcgggatgcactatacatccatagagaatattcataaagtgatagatccgctgtttcttgatgatttgaaaaaagaatttaaggagattcaagcggttactgttcggagaacaaaagaaaagaggttggatgaatttcagaataaacttgcatctctcacgtttttagatccggcgtgtggttctggaaatttcctcacagaaacctatttgtcgttgcggcggctggagaatgaggtgattcgtgaaagagttggcggtcagataacattgggagaagtccataacccaatcaaagtgtctatccagcaattttatggaatagagatcaacgactttgctgttaccgttgcaaagacagctctttggattgcagaatcgcagatgttggaagaaaccaaaaatattgtctatggcttcaatgatgattttcttccgttgaagacgtatgtaaatattacggagggtaatgcacttaggatagattggaatgaagtggttccggtagaacgattgtcctatataatggggaatccaccgtttgttggatattcgtatcaatcagaaagccaaaagaaagacattgagaatgtatatgtagacgaaaatggaaaatcaacttcaacggcaggtaaaatcgactatgttgcggcatggtattttaaggctgcaaaaatgatggagggttcagaggttagaacggcatttgtttctactaattccattacacagggagagcaggtggcttatgtttgggctgaactatataaacagtttgatattcatatagattttgcacacaggacatttgtatggggaagtgaggcaaaattaaaagcggcggttcattgcgttattataggttttagcacatcaatgtcaaagggaaaatgtcgtttgtatgataatggagcgcttgaagaaacggtacaaattagtccgtacctaatagatgctccgattacttttattaacagtcgtactaatccattatgtaatgtccctaagataacaaatggaaataaaccagtggatgggggatatttgtttttgtcaccagacgaaaaagatgaactcatacaaaatgagccagaatctaaaaagttcgttcgcagggtttatggagcagaggaatttataaattctaaagagagatattgcttatggctgagagatatttctccaaaagaattaaacaagttgccgatgataaaaaagcgtgttcaacaggttcgtgaatttcgattgaaaagcacaaaagctgttactgtaaaaagtgcggattcaccaacattgtttcaacaaattagacagccagatgaaccatatataattgtaccaagggtatcatcggaaaatagaagatatataccgatgggatatgaatcgccagaaacgattataacggattctgtccagtgtattccaaacgctgatttgtatacatttggaattattacctctaacgtacacatggcatggacgcgagtagtgtgtggtagattaaagagtgactatagatattctgcaaaaatcgtatataacaattttccatggccggagccaacagaacagcagaaacagaaaatcgaagaaacagcacatggaattttggatgccagagcacttttcccagacagtagtctcgcagatttgtatgatcctttaacgatgccagtggaattaagaaaagcacatattgcaaatgataaggcagttatggcagcttatggctttggcataaaaatgacagaagaagagtgtgttgcagaattgatgaagctatatcaaaaaatgcaaggataagtaagaggagtaggaaaacaggtatttctaagtgcctatttaatgcctataaagtgcctggaagtgacctttaagcgcctactccttgtcgggcttctcagtataacaacacgatagaagcatattaaaatgatttttacgttaaaaaagtgctgtgatcacaaggctttttgcaagcaaaaatgaaaaggctatatataggtagcctacgaaactggaagtgcccattttgggcctgatttaaagaatagtgtcctgacagagaacaatggaatgactctttgccggggattcaaggaaaggaaaaaatgatgaatacaaaaacagaggggaacacatttacaaagaaaatcgggcagacagtctatgttgtccgttatcatttcaatgaagatgcaaaggaaacactgcaggagaagaactgcgaaagtttgaaatgaaacagcaaaagaaaagagaaaagcataaggggcatagccccttgctggactcattcaaatcggaagttgtattattgaataaaatggagattttgatatgaaagacaaggcaaacaagggttattggcaacgacttgcaaaaatatatgcacctttgatggagtcagataagaaattttataatgcaatctgcggatatattagagattatctcaaatctgatatgaatgtattagaattagcttgtggaacagggcagctatctttcccattgtctgattgtactaatagctggacggcaaccgatttttcggaaaatatgattaagcaagcgaaaaggagaggtacaacagaaaaacttagtttttgcgtagccgatgcaacggcactttcatatgagaatgaaaattttgattgtgtagtaatttcaaatgcactgcacattatgccagagcctgaaaaagcaatgcaggaaattcgtagagtattaaaaaaagatggtattttgtacgcaccaaccttcttatgggcagagaaaaaatcaagtggtttacgaaagcgattgatgtctattacaggatttaaagcatacaaagaatggaacaaggaaaatttttgtgagtttattacggattatggctttacagtcgtcaaagtgaatttggtggatggcggtttagctcctgttggagttttgattgcgaaaaaaactaattattaaatttgaatttttctaagtgatagatactttacaaaataaacttcatatgttagattggtcagcaaaaactaactaaagaaagaggtagattatgaataaatttgatggtgttgcaaatacgttatttgttccgttagtggcaagaatcaatatctctaaaaaatttccagaatattttatggatgaaaaggctcttgagttggagaagtatttaccacaaggtgcagataaaggttcttctgaatatagcaatatggcatcggtagcacgttattacaatatggacaaaacagttactgcgtttgcaaaaagttacgcagaaagtaatattgtatatcttggtgcaggattagagactgcttatgaccgtttaagtgataagattgaaaacagaactgtacattggtatgaggctgatttgccagaagtaatagaggcaagaaaaaaagtatttggtcagcgaaaaaatgaaacgctcattgcaggcgatatgtttaaattggaatgggtaaaggaaatagacaattcgcttcctacactgctaattgtgtcaggtgtgttccaatatttccatgaagaagaaatcatagcatttattaaggggtgtggaaaagcatttccaaaaggtgagatgttgtttgacgctacaagtgagagtggattaaagtttacgaactggtttatcaaacgtacaggaaatgcaagtgctattatgtattttggtattaacgatagcaaagaatttgcaaacaaatgtagtatggaattattggaagaaaagacattctttccagaagcattgaagatgttagggaagaaactttcttttgttacaaaagtatctatgaaggttgcagagaagaagaaacaggtaataattcttcgtttgaaattgaattaactaccgtaaaattcaagtttgacagtattaaaaatagaatgtaaatttgagaacgcttaaagccactgttcatacactgtcacaggtggatatcaaacgatacggtaaataaaaaatataaataacaaaggagaccaacttatgggattatttgaaaagaaaaagaaagatgcagagcgttgcccgatttgtggcaaggagatatcctttttttcggggttagtaatcgcggacggcaccatctgtgatgactgtgagaaaatggtcagaggtcagttcaatatcgaagaatattatgggcgtgagaactggaagatatctaccagcgatccgttgaaagccatgacagtcgaagaacttaaggacatgatcaacgaaaagaaagcagagcagacgcaggtagtggaagaaattggcggtgattacgcagcgattgccaaggtggaaaagacatttggcatcgctccgaaggctacggatgtgggactgaaacgtgcaaaggttttgaaaaatagaatcgttgccacaagctatatcatgtcaggcgaattcagtagaggcgatgcggtaacggtttcatttgatggtgcagatatgactacgacgattctggatgtcatcgaatgcagttcatcaagtacatttgaaacagcgctgaatgccactttcggaaagcacaaggccaaagaaggagtcagtgcctggatcattctggatgtcatgggcggagttggcaaaggtgccctgatcaagaaataagcaatttgcgtggtttatcatttacagacacatgagtaaggaggccaacatgagaaacatgaaaaaacgattcctgcactgctgttagcactcggtttggcactgagtatgacagcttgcggaaacaaagagtcggaaactgttactccggacaatagcaccacaccggaagctgtggagccgcaaccaacacaggaagccacgggaacagaagagacaacaagtagagatgacacgggtgtatatccgaatgcaaccggtctgacagaagtagctatgggtgtgacagaagatatctgtacatttaaagtaccgttaaactatgtacttgcaggcggctattatgatgaaaataatgaagaacatacgattcagggcttgaattctgctaccacgactgttgaggaagcactggcagccggaagcttctctactggcaatcatctggctttctttacaatgacttctctggatgcagatcagaccatgattactactggcatgtacacgccggatatcatgtcatagaaaatcgtgcagaatggctcttagctaatgcacagaatatttggaaaatatagaatattccaaatccataaaagttgaatgaaaaccaatatgagaattttacaggtggtacaaaatttgtaaaattttcatattggttttttgataatctgcaaaaattataaatttggatattaaggaaagtttcggatttttgattttttatgtatttttcaattttggatatggctccgaaattggcaattttgcggaagtgtatccacacttcctgtccttgctgtttttaaaatcacatagtgatttcacagggatatagagatatttagtctattttatattcctgtgttgtgaccggaaaaattcggggaaccaagtgtatatttatgctgaatgtgaggaactggggagcacaatcctcagcaagataaaaacctgatgaaagaacatttgtcggaaagacaatattgttaaacacaggtggatcttgctttagaaaatgattagccataatgagttggaacgtgggaggaggaagtgtaaaaaaagagagagccataagtaactctctctgtgataaaatcaaaaagttatagtatcagtggttcggtaagattacaaaaatccttaacaggaatattttctttaagtggtaaagctgtctctaaaaaggtttcgtctgcaaatctttcgagttcagaatcaaaatgtataattgaagcatttgtatttaattgatatggcggaattgtaacaaaataatcataatcttcgtaagaaggagtggcgcaagaaactttgatttttccgcccaatttcaattttgcaaattctccataaatggcagttaaggctttttttctttcttcatcagaagtaattctatctacatatctaatataccaataatctatatttccctcttttaatttaattaaataatcgtatgatctgggtgttccagattttattgtccattcaattttatgcagacttgtcatcatggaaagtccacgcattaaggtagaaaaaaatttttcatgcacctgaacagtagagagatccagagaaaatccattgtctgcaattatcttttttcgttcccgtattttcttagaagaatatcccgttgcatcatataattcttggataagttctggatcatcaatggcttttgcaattttatcaatagtgcttttatatggtcttccagatcgggcaccgttgagcattcgtgaaatggttgcattatttaagcctgtttgttcagataattctttttgtgtttttttctgtaaaatgatttgaagtatattgatgaatctttcctgatcgtaaacgctgtcaggatttattagtgtgcctgaatttgatataaattcgctcattcaaatctcctcttgacttctttgactttgtataaattgacttcttgtattttatcttatcaattatatccctaaaaatcaatttaaaacataaagaaatcaaaaaatgttttattgatgttcttataaaagtcaaagaagtcaaaaacgtaattgacattttgatatctttgtgtataatgtaaatcaagaagtcaaagaagtcaaatgaatcaaaagaaaggaaggagggctgtggattgaaatatagggttgtttcggttttgaaagataatagaccacgttttttgattatttctgatattgaagaaattgaaatccttccatcaaagtatttgaagcatctggatcagattaatgcttctccgaatactgtaaaatccgcagccttcgcactttcatattattacaattatctgcaggagcaaacgataggattggatgagattacattgctatcctattcagagcagaataaacattttattgatttcttgtattgggttaagagtggaaagcatactgagcataatacacagacgagcaataagacctgcaatatgtatcttggtgcagtcttcagatactaccagtttttggcactggaagatgttttaccaatgcttaaagtcttacgagtaaaaaaagtatcgtattttgacagtatgggagtaaatcatcaaaatgcagtgaattcgtttaaaggtttcttcaaagaagaagaacctaatctggaagaaataacatccgaagaaatacaggagctgataaatgcctgtacgaatgatagagatcgattgctgatagcaatgatggcagaaaccggtcttagattaggggaaattctgggaatccattataccgaagatattgattttgaaagaaggacggttcgggtaaggtatcgtgaatccaataccaacttggcaagagcaaaaaatgcagaatatagaattgctttgttaagtaatacaacttttgagttcttggttaagtacatttctgataaccggaaaagtctgatgaactcggagtatctatttacaaaattgactggaaaaaacaaaggggagccattagatgcggattctgtgtatagcatgttgaaaaggctatccaaaaaaacggatatcaattcccatccgcatcagctccgacactattttgcggaggaaagaagaaaagaaggatgggatttgaatgacattcgttttgccctggggcataagaaagttgaaactaccattaaatacttgggtgaaaataatgaacgattgatagaagcaacagatcaatactactcaaataatgaagatttataccaaattgcagattttctgtaaaaggaaggagggattaccttggcagtattaaaaattgttccgaagttatatcaggaaaaaatatctgagaaattaaaggaagaaatatctttggttacgaatggagaagcaaaatattataaccggttatacaaattttttcagtatacagatatacagtgtactgcagatattaactatgaaacgagaaaaatgtatatggattctcttgaaaaagaggatatttcagaaaaatataaagtggaattaatgagcttatttgatcgtttaaaaatagaaaatataccggatgtctattcacatggaaatcccttctctgtagaacaggagttttttaagcaagacaaattgtttttgctgtatatccccaataagaagaaagcacaatctttccgtcaggtggtcgataagaatgatttgttatgggacttaacgaggatacattcatcacagttggtgcgacagacaaaaatattgctgtgtgaaattctgaatatggataaggcacaaagacatcgaagatattttttagaaccattaaaagcacttatacggttttgcgataagtacggaatagatgatattgaagaaatggaacaggcagacgaaaacagattttatctgtatttaaataatgagccggaaattataaaaaaacaggcttctaagattgttgagtttgcgagaagaacgttatttctaacagatccagagacaaattggcgagcgtgtatctggtatatggataggtttcagtttgataaatcgagaatcaatgccagttcacctgttaaaagcctttcatttattaatatttacgaaaaagaaaatcgttggtatttacaattatacgcaaaatatttggtcgggatatctgatctgtctttatcaaatatccgaaatacaataagttttatttcacaatttttaaaatatctggatggacagagtaaaaaagtaactgaactggagatgcaagatatagcggattatgtgtctgttttggatgagtccgatattaagtattccacttataaccgacatatcacacatatgcatacatttctacagtttttgaaaatgaaaaatattgaagtgttgaagttttatccggaacgatttttaaaaaaaggtttttcggaacacaatgaaagaagtgttccagaaaaaacaattgctcatctaattaaggagctgccgacattcccagagcatttacagttgatgtatttgattttgttttgcacaggaattaggaaaagcgaggtttgtacaataaaatcgggagccttttattcacaaggcaatgagaattggatgcgcatatatcaaagcaaaatgcggagggaaaaagtcattcctgttcccagtttattggttggactggtgaacgattatgaaaaaaagtacggaataaaaaatggggagtatttattcaaaaataaaaagggtggtgcatttaatggacagacattttcaaatcagatgattcgggagtgtaaggcccgtgggattgcctgcggagattatatctttagagcacacgattacagacataaccttgcaacctcaatgtacggaaatggagtttctatacaaggagtacgagattatctaggacattcaagtgagaatatgacaaaacagtacattgatttcatgccggaacgtattgtatcggctgaagataaatatttttcaaaaaatcagtcatttaaattgaaaggagtagaagatgatgaaaggtaatattaatttgatttcttatgactgttatcaacaagctacagaaaaacagttggctagtctgaaatggaaggaaaacagggtgtactatgtatcagagattcataatgaaaagatacaggatgagatttatgggtatattgatgatagatgtagacgtttatcattatcaacagcagtaaatgatatttacagatttgatctgttgaaagaatttctgaatgagaagtgtacaagttgtagtagcatcactgataaaaaatgggaagaactggagagaagctataaagcatttttatataaaaaaggattagcgctgtacgttagaagaaatagaccggataggcggaatgttgagcaacaaagtagcgctcaggtttcttttctgaaaatgtattatgagtatgttgtgaagtgtaaaacagctgatattccagaaaatgaaaaagatgtatgggatatgagaaagttggatattgtgccaaggagtaatccgattcgtggaagatatagattagattttcgtgagatcaggcagaaagaatttaaagagataataaagagaatattgtatagccactgccagacaaaagcaatgggtagtataaaaggtgaattgcgtggattccgtcggtttgctagcttcatgtatgatcggtttccagaagtaaagcattttacagaaattagcagggatatgatagaagattatctggtttatataaaaacggataccggtcttacatcggtcagttacacgacagagctgtcggttttggataatctgttggatgaaatagggcgtgaactggaaatagaaaatatatgcaacctttttctgtccagtgattgcagagcatatgataacgctttaccagaagcgtattcagatgcagaaatcaggagatttaattgtgcattaacaaaattaaagccccagttaggcagatgtttaataatacatcagatgctcggtacaagaatagaggatacgttgactttgcgaagagattgcttatctgagaaatctggacattattttataactattatccagcagaaaacaaggaaatacaaaagaccagttagcgatcagctggtagaattgattagaaaagcaatagaagtttcagaaaaggagcatccagattcagaatatatttttctgcaagataatggaaaattgtatacagattcaatgctgaaatatcatgtaaatatcatgatttatgaaaatgatatcagggatgataagggaaattattttgagtttcgtacacatcgttttagacatacttttggagtaaaacttacagaaatgaaattagatgatgatagcattgcaaggctgttggggcataaggatacacgaaccataccacattatcggcggttaagaaacgaagcattagcggaggatacaaaggctgtacgagatgaaatgaatgaattattagcacaatacaggagggaaaaggaaaatgcagaaacacgataaaatggtagcactggcaaaagaaaaaagtgcggaaatgacggaaacagcaataacagctattgaaacaatgtatagaaaaaatataaaaatttcagttgctgaacttacaaaactaacaggactttccagaggttttttctataataatccgaatgtgaaacaggtcatgatggaattgaaggaaaaacaacagggaatgatattgcaaaatcctaaaagcgctgctattgcaaaagcacaggaagcacggattaagagtttagaacagaaactatccgatagtgttccgaaaaacgaatatgaaagtcttcagaaaaaatatgaagaattacaggtgaaatatagtcaaatgaaaaagggaacactgttgaagatgtacgaccaattataggaagaaaaggagaatattttatgcagaacgaaatttatgatgagaaaaatggacttacttatatgttatgtggagattattatttgccggaattggcacttacagatatcgaaccaacttatgggaaatatgggatgcttcgtaaaagctatttacaggaacacagaaaggcaaaatatcaaatattgttgttacaaggaaaacttgtcgagcatttgaatcagattgatgcagaagcaagggatagggaagaacaattagtaaaacagatgatggagaaacaaggaattacagagaaattaaaaaggcaggacaacatggaatggacaaggaggatgaatgtcatttgtcatgatgcagaagagatgattttgacggaaatgatatacacaaaaggataatgaactgcattggatagcaagaattttgcagcccggatagcaaaaaagtggaagtccggatagcaaaaaaaaggaagtccggatggcaagattcttgctgtccggaaagacaaaaaagtgagggattaaaaatgttggttaagtacataataaaagtgtttttatatttaattcttgcagtaatgacattgattcgctggttattaaaaattccgatgatgttgggaaatattttgctttactttttatcaattatatttattctgacaggtgttttgagttatggatttgcattggaatctgcaagagaatgtgggcgaatgataataattgggatggcatttggtgcaataccagactttgtcccattttggggaaaaagtttagagacattggttgccaaactgttaagtatgacaaatgaatgagaaagtcaatatgaaagagggctgtgaaaggctctcttttctttttgcaactgtggaatggcaagataataacgttatatacagtgtatattaagtacagatattgtatttctgcatgatgggaacatagggagtccatataagtattaggaataccggtcatgacggaagtcttggaaccgcacatgccaacagtaccggagatatgatttcccgtgtggaaacgatggtgctgatggggatggaactgccacttgaagcggtacgaagacagattgcttccggggtagaacttctggtgcatctggaaagggcaagagacggaaaacgacaggtagcagagattgcagagattctgggatatgaggatggagaggtgcggatgcatggactgtatagaagggaaaaagatcaacttaaaaagattggggaattacagcacagggaaaaactggaacgctgtttcggtgaggcagaattataaaatatatgtgctttctgagaaggaatggatcttgtgtatcctgcagagtatcgggattacagggatcatcaattttttctgttatcgatcctggtgggcatggggactgggaattccgattggaatctggtatgcccgctggagaaaaaaggagttggcagagcggagacggcggattctacggaatcattttaaagaggtgttgcaggggctgcagacggcggtgcgggcaggatattcgatggaacagggggtgacggaatgcaggagagagatggaacggctttttgggaatggagatgatctggtgagagaactgcgatatatggaaagtcagatgcaggtgggtgtaccggtggagcagctgttctggaatctgggtcagcgctccggtgtggaggaaatccgtaattttggggatatctttctgattgcgcggcgttccggtggaaatctcgggaaaattcttgggaatctggcagaagtattgggagagaagatacgggtcaccggggagattcaggtagcgatcgcaggaaagaagctggaacagctggtgatgagtatggttccgggagtgatgatcctttatatgcaggtgacttccagcggatttctggatgtcttatatcataatctgccgggagtactggtgatgacagggtgtctgggtgtgtatctcttcagtttccgaatgggaagaaagattgtgaggattcaggtatgaatatagtactgggaagtgcttttttgctgctgacagggatattttatattctggtttctggagagaaaggaaaccggaagcaaaaaggtgtcaggtggattcaacggtggggaagaaaacatggctggcagcttccggaatggatgacagaggagtgtatctggcagacggaactggcagtgctggtggcaggagtgcttctgattgcagcgggagtgacagagcaggcagagaacggtcaggagatttcacagttaagacggccggcatatggtcagggaatacaggaagaaagtctcgaagtagaatggagagatgagcagggaaaccggaaaaaggaatccatgacagtggatgtaatagaaaaacaattgtccgagaaggagatagaaaccattttttctgaggtacgcggcgcgattgaaaaagagatacttggagaaaatgaatcgctgaagcatgtagatcatccgttgtatcttcgggaagaactgcaggagtacccggtgactgttcgatggttcagcagtcgtccggagattcttgactgggaaggaaggcatggagagaacatcagggaagatggggaagcggtaacgctgacagcaatcataggacttcaggggcaggaacggaatgaaagctgggatattctggtatttcctgaaatatctgatgaaaaaaggcaggtagaagatatggtggaaaaggcaaatgcagatacagaaaaaggttcagagtggatgcagcttccgaaaacactgcatggagaaaagctggtatggaaaaaagtaggagatggcatgcagtacggagtagctttgctggcattcgcccttccggttatggtacttctgcatcggcagcagaaagaaaaagagcataaaaaggaagaacagcaacagatgcagcaggactatcctgagatcgtgacaaaactgcagctgctgttaagtacagggatgaatcttcgaaaatctgtagaacggattgccggtgattatgtttcctatatgcgcagggaggaggtgagaaaggcttatgagatacttgtggaagtatgcggagagatggaacgcggtcttggagaaaaagaggcttatgagcagctgggagagcgttggggactgttgtcttatcgtacattgtcttctattctggtacagtgcctgcagaaaggaagcgttggagtggagcagattctggcaaaagagacagaacaggcgcagcggcttcgcaggcagcaggcgcagatccttggggagcaggcatccaccaggctgctgttcccgatgattttaatgttgctcgtggtgtttgtgattttgctagtgccggcatggctgacattcgcagtctgacggtggagaacagaaacatgtcttatctgtgatgtttcggcgatcagaaatatctccgggccggaaaggagggaaaaatatgacactcttacagagatttatgcaggaagaagacgcactgggaacggtggaattgattctgatcattgttgttctcgtcgggctggttgccatctttaaaaaacagctggtcagtctggtgaataatattcttgcaaaaataacaaaacaaagtaacagcatctaaaaagtaacctgtcaacgaaaacatatcagttacgacatatttcccaaagaaagaaggtatcccttgaaaaaatcaggaagtataacggtattcaccagtctttttctggcagtctttctgctggtctttcaggtacttctgcagtcggtacagattggaggagggcgcgtacaggcggaaaccggtgtggaagaaggtctgtattcggtatttgccgggtatgaccgggaactgctggaaaggtatcatgtttttatggtggatggaagttatggaaccggagtgtggaagccggagtgtatgtatcaaacggtaaaaaaatgtatggaagagagttgtcgtccggatggagcaatatcaggtgttcgtggggaaaatctgtggaaatgttcgtctgtctcgggggcaattactgcatacacactgatgtcagatgagcatggacgcggatatcgtgcgcaggcggtggactacatgaaggagacacttggtattcaggggatacagcttcttatgaaaaaatatgaacaacagaaagatatttttgaacaacaggaaaagagagggagtgatatcgatgtaaaacagtctatggacagttatgaaaaagccaggaaagaagccggtcaaaatcagggacaggatccggataatacaggacaacaaccagccgtggtccaggttccggctgattttgtcaatccgctggatgtgatccggcagttacagaaaaaaagcattctggcactggtggttccggcgggaaaagaactgtcacagaagggactgccaaaagaaaaacgactcagcagacgggaaaagcagaccggtatggggataccgttttatggggcgcaggaggatacggttctgacaagaggaatttttcaggcgtatatgatgcagcatcttactgattataccagtatggagcatgcgacagacccgttgcggtaccagctggagtatgtgattggtggaaagaacaccgatcaggaaaatctgaaagcggtggtataccgtcttctggcagccagggaagctgccaatatgatgtatcttttacaggatccgaccagacaggcagagattcatgaaatggcacttgtcatctgtgctgccataggatttccggcgctggaaggaatcgtaagtcttgcactgcaggcagcctgggctttcggagagagtctgctggatgtaagacagttgctgacgggcggtaaggttccgctggtaaaaacaggagacacctggatggtatcgctgcatcagctggcgaagattacagagttactgaaaaacagcagggctgtggaacaaaagggcatgacatatcaggaatatcttgggattttactgatgacagggaagtcagaggttcagactgagcggacgatggatatagtggaagcggtgatacggggaatgtcaggaaaagaaaattttcgtctggatcagggagtgatctatctggaagttgacatgggagtgacttttgcggaaaagacattttctttgcaaagagattacggatatgcaatgggaagtgactgacggaaaggtgtctgaaaaagacggacatacagatatggaaaggacaggaatgaagacagccataaagaaaggaataaagatatactctccgaaaataaaaaaacaaaagaaaggtaaaggatctcttcaggctatctgcaaaaacaagcggagagtatttctttgtttctttcggaagacccggggaaaaaagcagcagatcccggcggtgcttactgtggaagcagctctggttatccctttatttctgcttggaatctgtaccttgcttggaataatggatctgtaccgggtgcaggcacttgtgaaaacatctctgcatcagagcgcacaggagcttggtatgtatgccagtgtggaaagcggggattccggggtgaacacgccgacaggagtactttcttccggtgtctgcatcgcttacgcaaaagcacatcttccggagctcggggatggcgcagcagtgagtctgatcggatcccgatatgaaaatcataagattcaactgaaagctacagtgttgtatcaactgccattttcaatccttccggtatcaaaacttaaggtgacgaacagcagtgtggtgcatgcctggaccggatatgacccgaaaaatacagacaacgagggaacagatggcggagaaatggtttatgtgacagagtatgagagcgtatatcatacatcagaatcttgtacccatctggatctctcggttcatcggggaataaaaacacaggtggagcaaaaacggaatgaatatggaggaaaatatcatgcctgtgaacggtgcggtggtgacagtgccctggtttactatacggaaaaaggagactgctatcacagtcaggcatcctgcagcgggctgaaacgaaccgtgcgtctggtgaaaaaatctgaaatacaggcatatatccaatgtgagcgatgtcgtgaaaacgcaggttaaaaaggtcagggatccaaaaatatttgcggcagtgtgcggaaaggaaaaagatgggagtattgacaaccggttatctgatggtaaacagctggactgactggcgaagaaaagaagtggatattgtgtggaccgtggcagtttttattctgacggcgtttatatatgtaggaacagatcagaaactttgctggagtggtcttcttccgggaatctgtctgtggcttgcatcattgtggaggtcggatcagataggaagcggagatggaattgtgctgatggggatcggatggatccagggaatacagcaggcatgtgtgatttttcagacagcgattcttctggcggcagcggttggggtctgcatgttggcattgggaatgggaagaaaaaaggaacttccttttgtaccgtttttattggccggatatctggtgcagtatatctgagaacgggaaacagatgaaaaggtttgtgaatatacaaaaaaggagctgaagtatggaagagacaggaaaagagaaaaggtacagcagggatccggaagcaaatcagataaagaaaagggacagacgaaggaaaaaaggttctcttacggtggaggcatcgctgatagttccgttgtgtgtgataattcttacctttctgctttcgcttactttttatgtgtatttgcgatgttggtatacgcaggcaggatgtgaggtatctgttcagggaagtggatatggtgtgctggaaggaagaacaggacaggaaaaagcagagaaaaaatggaaaacaaagcgtagtgaaagtggattttcgggaaaaggtatctcaggtgagattacaggaaataagaaggaagtacgggtaaaaataacaggaaaagtacccgtatggggaaggccgcatctggagtttgagacaaagatcggacaaaaaatcatacgaccggttatatttgtgagaaaagtgattgcgtttcgtacataaaaagaaggtttttagagatgaagatggattacagaagagatttgcagcacaattatctggtggtggagaccggggagaagacagaaaattatatcacaagaatgatgaccgaaaatcaggtgcaggggcttcttgggtgtgagtgcagaagaatggatcagaaaaaactgtattattatgatattacctcaaaaatatcgcttgcagaaaaaagcaggttaaaaaaggtaaaaggatcggaagtgcttcttattattcaggggctgttacaggtgctggtacagctggaggaatatctgataccggcagatcagatctgtctggactggaattatatttatcttgatcctgtcagctgttatccctctttttgctgtcttccggcagcggagaaaaaactggaacaggggattcgggaacttctggaagagttgcttccacgactggatcatcaggaacagaccggggtatcggtagtttatgaactttaccagtatgcgatccaggatacgttcttggtaatggggttacaaagtgttttggaacggcggctgatggaagagagaaaaacgacagaaacagaacttcaggcctgtcaggagaagaaaagcagagaacatcaggaaacatcatatttcggagataacagacaagcggtactggaagatttcttttcttcagaagaggaggaaggagaaaacgggcgggtgagtcctgttttggtcggaatggtgctgggaattatcggagttttgttgtatgcactggcagggtatgctgttctggaatatgttccacaatatctgggaacctgggcagcatcgggtgtgatggcgatattaattgttctgatctggcaggtggttgtgagaaaaagaaaaaaagaagaacgacagattgaggaacaatttgcgatctatcagggaacatcggaagaagcgccaaggcattcgaaaacagatatcagagaatgggaggagaaggataaagagctggaagcagaagaaatcacatgggaaaagcggattccatggggaggggatacctatacccagattctttcaaacggaggagaacagggcggtctgattctgaaggaactgcacccggtaagtggcaggcagtttcggatagaaaaagcaacccgtctcaccatcatcggacaactgaaagaacaggcagatcttgttctgccatccacagcagtaagccgggtccatgccagtatcgaacaacgggcaggtaactggtatctgaaagatatgaattccagaaacggaacctgggtcaatgagcaggaactttatggagaagaagaacaggaactgatcaatggcgatcagattcggtttgctgacctgatataccaggtgaagatatagcagacaggttcgttgattttccttgtaaaacaggaagtgtgggcatataatgaggaaaatataactgatgtctgacaggaggaaaatatatgaaccggtatcaggatgaagactggcagcaggaggagcagagaaggcgggaaacgtattaccggatgaacagccagaacagtaacacaccggatgcactggaacaaatcttcaggggaccgttaaactggatgaatctgttgatgatcgggatcaatgtggtgatttttattatcatggagtttttggggagtacagaggataccgggtttatgttacagtggggtgccgcttgcagaccgttcattctgaatggagagtggtatcggctgtttacttctatgtttctgcattttgggatctatcatcttgcaaataatatggcggtattgctgtttatgggagatatggtggagaatgcagtgggacactggaaataccttgcaatctatcttggctccggactggtgggtaatctgttgtccctgtatatggatattcagtcgcagagtaatattgtcagcgcaggtgcttccggggcgatctatggaattatcggtggagtttttgttctgatgatcaaaaacaaaaagcaggtgagagaaatagtgatccggcggctggtgtttgtcattgtggttacgatctactacggttcacaggcggcgcagattgataatgcggctcatgtgggcggtctgatcggtggaattgtattgacagtactgtttacggtacataaaaaaaccacatatcgcaacagaaaagaatatgttgcaagatgactggaaattttctgataatgcgtgtatcatggtaagaaaaaagaacgtaactattcagtagccactgtcccgcgaggtgttttgacatgaatatgtcaaaattccgagacatacaagccaaaatgccatcaccgaaggtgattttttatgcattttggctcgtaactgtgaaggtactgaacagttacaaaagaataataatgcaaaacagagaggagaataaatatgagtgactgtattttctgtaaaattgccggcggagatatcccgtccgctaccctgtatgaggatgatgattttcgtgtgattctggatcttggtcctgcaacgaaaggacatgccctgatccttccgaagcatcattatgcaaacctgtatgagattccggaagagatggctgcaaaagcgatggttctggcgaaaagaatggcagcagccatgacggaagcactgggctgcgatggttttaatattgtacagaacaatggtgaagtggcaggtcagaccgtatttcactttcatatgcacctgattccgcgctataatggcgatcaggcaggtatcacctggaaaccgggcgaactgaaggatgaagtgagagacgagattgttgcgaaagtgacagccgcattaatgtaagaaaacggacaggacgataaggtgtatctgcttatcgtcctgtccgttttataaatcatatgcaactgttcggtgtcttcacggttatgagtcggaactcacttacttcgcgcaatcacaaagcattcccacaatcttgccgatggaatccatctggctgcttttgctcatcgcttcgatatactgctctctgttcttgtagaggtcacggatcgtttgcagcagtttctcattggtgatctcttcttcttcaagaactttactgtaacccagtcgttcgaaggagcgggcattcagaatctggtcaccgcggctggcattggcagaaagaggaatcagcagatttggtttctttaaggcgctgatttcgcagattgcattggctccggcacgggaaattaccagatcagacaaagcgaagagatctgaaagttcatctttaatatactcatactgtacataaccttctgtatccgtcagggaggtatccagttttccttttccacaaagatggatgatctgaaaatcctttaacagatctggcaggatgttgcggacagcggtgttgacagcgacggaaccaaggcttccgccaatgatcatcagaaccggtttaccggctttcagcccggtaaagcgaagagctgcttccggatcaccctgcagaagttcctgacggatcggagttccggtaaggactgccttatcagcaggaagtttgctgacagtttccgggaaattacagcagactttcacagcggacgggatacaaagcttgttggcaagtcccggagtcatatcggactcatggataattgccggaatcttacaacgctttgccgcaatgacaacaggaacactgacaaatccgcctttggagaaaaccacatccggtttcagtttcttcagcagttttctggcttcggaaaatcctttcagcacacggaaaggatcggtgaagttctttacgtcaaaataacgtctcaatttaccggaggatattccgtaataaggaattcccatctcttcgatcagttttttttcaattccgttataggaaccgatataagaaattgtaaatccctgttctttcaatgctggaatcatagcaatattcggtgttacgtgacctgcggtaccgccgccggtaagtacgatatgtttcataatgtcctcctgaatgcataatactctcccggaatctttcgtctgttgttttgcgattgattttccgaaagggcagtagtagaatcaatgcttttacatataatatttttaatagtttcattgtatcttattaagaaaaaaagtcaagaaacccataattattaaaagaaaataaaaaggaaaagtattttgcatttctgtatatatacgcgtataataagaatataaaagcaaaaacgtgataagattctgaaaataaaagaaaaggaggggtttttatgaagataacatttgtgggtgcgacacatgaagttacagggagctgttattttctggaagccgccggtaaaaagtttctggtagattgtggaatggagcagggaccggataattttgagaatataccgattcctgtgccggcttcggaacttgattttgtactgctgacacatgcacatatcgatcactccggaaaacttccggttctgtatgcggaaggcttccggggaaatatttatacgacatatgccacggtagatctgtgtgagatcatgcttcgtgacagtgctcatatccagatgtttgaggcggaatggagaaacagaaaaggacggcgctccggcaaggaaccggtacagccgctgtatgatatgaacgatgcacagggagcgatctctcatctggtgggatgcccatatcagcagatcctggaactggctgacgggattcaggtacggttcgtggatgccggtcacctgctgggttcagcaagtatcgaactgtggctgaaagaagatgatacagaacggaaaatcgtattttccggtgacatcggtaataaggatcaaccgttaattaagaatccaacgtatctgcaatctgcagattatgtggtgatggagtctacctacggtgaccgcagccatggtccacgggccagctatgaagatgagctggcaagagtgatccagagaacctttgaccggggagggaatgtggtgatcccttcgtttgcagtgggaagaacacaggagatgctttattttatccgtaagatcaaggcagatcatatgatacagggacacgatggtttcccggtgtttgtggatagtccgctggcagtaggagcaactactatatttaatgaacaccacaaagactgttttgatgaagaggcgatggagctggtcaataaaggaatcaatccgatcacgttcccgggactgaaactttccatcaccagtgaagaatccaaatccatcaactttgatgaccgcccgaaggtcattatctcggccagtggtatgtgcgatgccggtcggatcaagcatcacctgaaacacaatctgtggcgaccggaatgtacggttctgtttgtgggatatcaggcaatcggtacaccggggcgtgcgctggtggaaggagcgaaagagatcaaactgttcggggaagagattcaagtcaatgcagagatcaaagttctgcctggcgtcagtggtcatgcagataatgagggactgatggagtgggcgaaagctttcgaagagaagcccaaacaggtatttgtgtgccatggagaagatacttcctgtcaggtactgaccggaagactggaagatgaacttcattatacagcgatggcaccgtacagcggaactgtttacgatctgaaagaagcagcattcatcagctgtccggaaggtgtggtcatccgcaagcaggagacaaaaccgcagtcgaaaggttccggtgtatatcagcgactggttgcagccggtcagcggctccttacggtgatccgtcataacgaaggcggagccaacaaagatcttgcgaaactgaccagccagatcaataatctttgtgataagtgggacagatagttttacgaatagttgtatcaaaaataaaaagtgcccctgtcaaaagatcggcatgtctgacagagatctgtctgttatgtcggccttttgatagggacattgtgttacgtatgtgcaaaaaacaggatatatttcctgattactggttcagcgcttctttcagggcttttgccagctgatccggacatgaagtggatttgaaaccacaggtagttccttccagacgattgatcacgtcccgggcatcctgtccttctaccagagcaccgattcctttcaggttgccgttacatccgccggtaaaacgaacattgtatactttgccgtctttcaggtcgaagtcgatctgagaagagcaggttccttttgtcttgtatgtcatgataattcctcctttaattttacatgtacttccgaatccggtacattttagatctgcaagctattatatcatgattcgcaccttcggtgcttgacgctgctttcgcagctatcatgatcgccattcgccgctcccgatgaacaaacttcgtctgttcccgctcgctaacgctcattataacaaatattacgtctgatttccagtaggggaatcgaaatgttataatttgtcataacagcaaaacggaaggaaaaaggttgaggaaaaaatgatgctttgttataatgaagagcaggcaaaactcccgggaagcaggagaagaccggaattacagaggatatgagtacttttatgaaaagtgtaactgttcagtactttcacagttacggacaaaaaagaaacaggagagaaaagatgaaaaaaatcgggattatcggagcaatggagctcgaagtagaagaactgaaaagtcagatggaagaagtttgtgtaaaagaaaaagcatccatggaattctatcagggtacattaaatggaaaagaagttgtcgtagtacgttccggaatcggtaaagtaaatgcagcggtctgcacacagattcttgtggatgattttcaggcagaagcggtgatcaataccggaatcgccggatccttgaaggcagagatcaacatcggtgatattgttgtgtctaccgatgctttgcagcatgatatggatgccagagaatttggttatccgaagggccagattccacagatgaatgtattttcttttaaagcagatgagacactccgtaaagtagcagcagaatgctgtaagaaagcgaacccggatattcaggtgtttgaaggaagagtggtcagcggtgaccagtttgtggcaagcagtgaagtgaaggatgaactgatccgtgaatttgcaggaagctgtaccgagatggaaggagcagctatcgctcaggcggcctacttaaaccatgttccgtttgttgttctgcgtgccatttctgataaagcggataacagtgcaaccatggattatccgacatttgaaaaagcggcggcacgtcactgtgcgaatctcgtgaaagagatggtaaaagcactgtaagaaaaggatttgtcatggtaaaaacctgtaagaatttgacgaacgattttagtttcaaatcaggtatgtggaggatataatatttccagaacatcgttttgcaaatgcacgacttccggatccggcgatcgggggtgcgggatggacaggcatttgcgggaggatgtgaaaagtgactgccaattcagtattgaaataagggggtacggaaatgctgcatatttggatggaacaaaatgtgttgttttacgggatgatcggagcgggaattcttggaatcctgtgtatgtttatggtcgaccgtttctacggcagagccatacgggatgtacgcaggataacagaaccgaaaggaaaatggacaaaagaatttttgaaccagtaccagatgcgtctgacgaaagagcaggagatcaataatccggaggcatttgtgaggacgcagcttgccaggggaaaaacactgggaatcgggatacaaaagtggaagcagggaatcggctacagcgcggttctgtgcttccttttgattctgacggcagtctatgggacttaccgttataagcaggcacagctgctgcgttacgagtatgtactgaccggggcgggaatcttcgccctgttacttctgatgaagcaatttatgggctttatgaataaagaagatatgattcttgatggtcttctggattacatggaaaataccctgcccgccagaaaaccggtgccggatgagcaggcactgaaagagcagaccagagaggaactgatcgataaagtaacagaggggatccggcagacggcggcaagtgagacaaaattttctcatatgctgacaccggaggaagagcatattatgagggaggtgattcgcgaatatctgatctgagcagagcgttaacttgttattttcataaagcaggcagacaccagcatgcggtgtctgcctgctttccatacaaactactcttcaatcacttcaatttccagataatcaaaatcgatcgtctcaataaaattatcggaggtaaaccgggttttatcgtggcgtttaaaatccataatattattgtccagccagatcggtttgctcagatcccagagataacagatctcttcgagagactggaagatcttatgggtcctcgtgtcatccgcatcgttgcagatcacggtgtctttcatcatgtgattatcggtccatatttttccccataaacgaaacattgtcggagtctcctttcccaaaacaaaaacggtgaactaagtatatcggaaaattctctttctgtaaagaaaagaaaactattgcgtttgctgaacacggagtgagcagtaacacgacttcagctgtaagatgtttgtaagtttcgtttgatgcaaagatgtgatatgataaaatcgtatataaaacagaaatttaaaatatcttaagattttccctatcctgaaaacaagatttccctgataaactgacagcgtaaaaggaaagaggaagaagaaatgaggtgaagaaatgttcaatattcttgtgtgcgatgatgataaagagattgtggatgccattgatatttatctgtcacaggaaggatatcacattttaaaggcgtacgatggactgcaggccatcgaaatcatgaaaaaagaagaagtgcatctgatccttctggatattatgatgccgaatctggatgggatccgggctacgcgtaagatccgggagaccagcagtgtgccgattatcatgttatctgccaaatcagaggatgtggataagatccttgggctgaacatcggtgcagacgactatattacaaaaccatttaaccctctggaactgatcgccagagtcaaatctcagctgagaagatatacgcagcttggaaatctggcgacagaagaaaaagaggcggtatacgtatgtggcggtctggtggtcaacgatgatctgaaaactgttacggtggacggggagccggtaaaattaaccccgatcgagtataatattttagtgctgttaattaaaaatcagggaaaagttttttctattgaacagatttatgaaaatatctggaacgaagaggcgattggagcggacaacacagtagccgtacatatccggcatatccgtgaaaaaatcgagatcaatccgagagaaccccgctatctgaaagtagtctggggaatcggctataagatagaaaagatgtaaccctccgtgggaggctgcaaaatggaagagaaaaaacaaagaaacaaattttattctgcctgggcaaaggggatcgtgatcgcgttgtttctgacagcggttgcctgtttttccgtctttgccatgatctttggcggtctgatgtgccagggcttcagctgggaagagctgacaagcaattattacaacgagaaaaattatctggagactcaggattgtggacagcggatggcttcacaggtaaataaagtccgtaatgcactgagtgacggaaagccgtttttaacaaaaggaaaactggataagaccaagctggtggatatcacgagactggatgcaaaaaccagccagcagaatccggcaactacctataccgtagaggatcttctggaactgaaggataatggtctttgggatgagtttcaggatgcaatctggagtgcagactatggcatttacgaagaatatgacgaagacgatgaggaatactatgaagacggtgaatatgacgaagatgacaacgagaacgatacaagccccactgaggatgtagatatcagtgattacacacctcgtttccgttatctttacaattatgcaagagattttgaaaccgtacttccggaatccggagagactctggcggaatatgccagaaccaatccgaaaaaggtatctctgtttgagctgtatcagcaattatcgaatgccattgatcagctgagctcttaccagtctgcaatcaagatggatgataagaccaacgtgatcttcatggtgcagaatctggataacaaggcagtatataccaatgtgtcagaatgggcagatgggaatgtagatccgaaaagtctggaagatctgatggaagatgtgccggtatttgtcgcagaaagagaagacggaaaactgaaagatgtatctgacaatggcacagatgccggaaagtggatctataattattttcaaaatgatcccgtaaccggaaaaaatgagaaaatcatagtttctgtagatgtatcatttccttattccgatgagatctccgctgcgtacgtatcttatgaaaattatgcaggctggggcaatgggctggtagtcggcatgcttatcagtcttgttgccggtatcctgttcctgcttatcattactctgcaaagcggtctggtatgtcgggacagagaagtgcataccatgcctgcagatcgtatccctgccgaggtgatgcttgcgatctgtggtatggcactgatcggtatggtcggtatagcgggattagggctgatgccagaaagcggcaatcctgcagacggcttttggcttaccgttataactaccggggaaattcttggtgcggcggtatttcttggagcgtatctcagtgtgatccgccgttggaaagcaaagactctgtggagatccagtttttgttataccatcgtgaaaagctgtaagaaagtatatatggcacgtacaacttccggtcggatgatcgtggcatttgtcggactggtgttaatgaactatctgctggcagctcttttcggcggattcggtctgatcctgctgtttttggcagatggtgtggttcttttatatatgatccgggaaaatgcaggacgtcaggtgatctatgatggccttgcaaggctggcaagcggtcagctggattataagatcgatgagaaagatctgacgggtgataaccgccagatggctgcggctgtcaaccgtgtaggcgaaggcttgcaaaacgctgtgaaggaaacgttaaaaagtgaaagactgaaagcggatcttatcaccaatgtatctcatgatatcaagacaccgcttacttctattatcaattatgtagatcttctgaagagagaggatatccaggatccgaagatccggggctatatcgaagtgttggataacaaatccaaacggctgaaacagctgacagaggacctggtggaggcgtcgaaagtcagctccggtaatgtggtgctggatatgaaacctatccgcttcggagaactgatccgacagacaaatggggagtttgaggagaagtttgcagccagaggactgcagatggtctgcaagatggatgaggagccactggtgatcatggcagatggccgccggatgtggcgtgttgtggagaatctttataataatatcgctaagtatgccatgccgaatacgagggtgtacgcggaggcgagaagggtcggctgcagagtcgtgctggagatcaagaatatctcggaaaacccgttgaatatcaaggcggaggaactgacggagcgttttatccgtggggatgtgtcgagaagcacggaaggaagcggactgggcttgtcgatcgccaagaaccttgtgggattgcaggggggaacctttgatatttacctggatggggatttgtttaaggttgtgattacgtttgaggcggtggataaagagagttagataagaggtaggtaagagttatataaggaggacgcgtcaggctcccggtgggtgtgtaggggcaacgtgggcagggcaactttgagctagccgctaacttcggctatattcacgagggtcagcggaccctcgcgaaagcctacgtaagcgtcggatctcaaagcttgccctaaccgcccacaaagtgttgcccctacacacccaccgggagcctgacgctgactttggaagatgcccatctgtatgagtgaaacaggtattgcaatcgtagaactattgagcaggaaaccaggaaggcaccgctctagtacatcgttttcaaaataactgtatcattcacttgtctgcgaattcgattgcacagcttaaaaagcctcagcgtagcccgctacgtctacgttttttgaactgcacactcgaatctgtatcctgtgtggatgatacagttatttacgaaacgatgcaccggatccagatagtgggagcatctcactcttgtttattggagaggtgaatgatgagtggaatgttaaaatgtatagtctaataaaaaaacgtgtgatcggtaaatcgtaaataattaccggtcacacgtttttttgcggttttgagattagtgagtttcgtcctcgctctccttttcgtcctcctttggcagttctgtcgggtgcaggttggagaatatgctggtgtcgatggctttttcttcgccgttttcttcggtatcttttccggcatcctcagggatgtagttgtcgaagagttttacaaagaagcgggagttgatatatgccacggtggcgaatcctagcatgatgtagaacaggatcatgaatggaaaggcctgtgcaacaaagattccaagcaatacaggtgccgcagtgatcaccatcatcagtatggtatacggaagatggcggatggacatcagaatggaattgcgaaacagatttttggtagtgttgaagaactttgcaagtaccgggtagatccataaaaacagcatggtgtagacaaacagtgctgctacaaatatataggaaaagatccgatatacagctccctgaccggacatcatccggcagaagtacagatcgaatgccagaacgataccaagcagcagcataatgatctgaatgacaattccctgtttcaggttctgcttaaaggaatggaagaatccttttaccacataagattcttcgttgcgtgccatcttcaacgtgatgtaatacatggccgcgatcgccggtcccgcagtaaccaccgggatacagcagacaatacataagagattcaagatcatgagatcagcgaccctgcccatgaaggagaaaaacttgttgtccggattaaagatgttgttcatagcaaattgcctcttttcttcggttttccgtaactgttcagtactttctcagttacagtttttcttaatagcgatatacgcaatgattgtcatcagtatagcgaattcaatactaaaaagcaaggaaaaagggggatgaaagtattaaaaaagtataatcaaaaaacggttcgtcaaagtgaccatgaaaggatgaaaaaattggtcaaaatgccataaaggagcggaatccaaaaaatcaacacacatttgtaacaaggtcatggtggaaactttgtataattcggttatggtcaaaaaggggtctatccgatatactaagtacagtcgcaaggcaaggtgccttgaaaaaacgaacattacttaatttgactagtaggaggaattaattatggcaagtttatcattacagcacattaacaagacatatccgaacggatttgaagctgttaaagatttcaacctggaaatcgctgacaaagagttcatcatcttcgtaggaccatccggatgtggtaaatctactacacttcgtatgatcgctggtctggaagaaatcagtggtggtacactgaagattggtgataaagtagtaaatgatgtagaaccaaaagacagagatatcgcaatggtattccagaactacgctctgtatcctcatatgacagtatatgataacatggcatttggtctgaaactgagaaaagttccgaaagatcagatcgataaaatggttaaagaagcagctaagatcctggatctggaaaaactgttagaccgtaaaccgaaagctctgtccggtggtcagagacagcgtgtagctatgggacgtgctatcgtacgtgatcctaaagtattcctgatggatgagcctctgtcaaacctggatgctaaactgcgtgtacagatgagaacagagatctccaaactgcatgagagactgggtgctactattatctacgtaacacatgaccagacagaagctatgacactgggtaccagaatcgtagttatgaaagatggtgttgttcagcaggtagatacacctcagaacctgtacaacgctccaggaaacctgtttgtagccggattcatcggatctcctcagatgaacttcctggatgcaactgtaaaagttaacggaaaagacgttactctgcaggtaggtaactacagcctgaaactgccggaaaacaaagcaaaagctctgatcgatggtggctatgatggaaaaactgttgttatgggtatccgtccggaggacgtaacagacgatgctacagctttcccggaaagcacagtagaagctaagatcaacgtatacgagctgctgggtgcagaagtattcctgtacttcgatgttgaaggcttcaacatgacagcccgtgtagatcctcatacaacatccagaacgggtgataccgtaaaattcggtctggatatgacaaaagttcatgtattcgacaaagaaacagaactgacaatcaccaactagtcaaaagtaaatatatatggtgccgattccttcgggagtcggcactttttactttagtaaactattgcattgatttgttgcaatttcatggaaaatacgatattatgtaactattcgagtgactgcaaagatactgaacagttacctgttcgagaatctatatctgcagacttctggcagtaccggcagattcgggaaacagaaaaacgataacagataagcaaaaatgagaggatgtgagcatttggtttcaagtcaggttttacaaaagacaattgatgaacttcgggcaatcaccagaatcgatctgtgtgtgctgagtctggaaggacagaaagtggcttcaaccttcagcgaagaggggtttgagccggaatatgtaagagaatttgtgaaatcaccggcagacagtcaggtattgcaggcgtatcatttctttaaaatatacgatgatcagaatgtggaatatgttctggtgacaagcggcggaagcgaagatgcatatatgatcggaaagatcgctgtatgtgagattcagaatctgatcgttgcctataaggagcgcctggataagaataattttatccagaacctgcttctggataaccttcttctggtggatatctacaatcgtgcgaaaaaactccggatcgacacagaggcgagaagagttgtatttattgtagagacaaaatacgagaaagacaacagtgcgatggagacgatcaagagtctgtacgcatcaaaaccgaaggattatatcacagcaatcgatgagaaaaatattatcattgtaaaagagatcaaggaagcggacacttatgaggagctggatcacgttgcaaaaacactggtagatatgctgaatgtagaagccatgtcacaggttcgcgtatcttacggaaatatcatccatgagatcaaggatgtttcccgttcttataaagaagcaaagatggcactggaagtaggaaagatcttctatgcggataagataatcgttccatataataacctgggtatcggtcgtctgatttaccagttgccgattccgctgtgtcagatgttcatgaaagaagtattcggcgaacagctgccggatacctttgatgaggaaacgctgacaaccattaacaaattctttgaaaataacctgaatgtctctgaaacatccaggcagctgtatgtgcatcgtaacacgctggtatatcgtctggaaaaactgcaaaagagtaccggactggacattcgtgtgtttgacgatgcccttaccttcaaaatcgccatgatggtagtaagctacatgaaatacatggaaactcaggattaaccgatcaataggaggattatgatgattcaattactggaaggcggtacctacctggtcaatgggaccgaactggtagaaccggcaaaagcagcagcacaggaacttcctgcgccggaagaagcagcaaaacagaccatggcctacaacatattaagagaccataatacgtctggaaatatggaaaaacttcagatcaaatttgacaagctgacatcccatgatatcactttcgtaggaattattcagacagcaagagcctcaggactggaaaagttcccggtaccgtatgtactgaccaactgccacaactctctgtgtgctgttggaggaaccatcaatgaagatgaccatatgtttggccttacctgtgcgaaaaaatacggtggtgtctatgttccgcctcatcaggcagttattcatcagtttgcaagagagatgcttgccggcggtggcaagatgatcctgggatctgacagccataccagatatggtgcactgggtaccatggctatgggcgaaggaggaccggaactggtaaaacagctgctgtccaaaacgtatgatatcaatatgcctggtgttgttggcgtatatatgaccggagcaccgattcccggtgtgggtcctcaggatgtggcgctggcaatcatcggagctgtatttaaaaatggttttgtaaagaataaagtcatggaattcgtaggaccgggtgtgtcaaacttaagtgcagattttagaatcggtgtggatgttatgactacagagactacctgtctgtcctctatctggagaaccgatgataagatcgaagagttctatgcgatccacggcagaagcgaagattataaagaactgaatccgggaccggttgcatattatgatggtatgctggtggtagaactggacaagatccgtccgatgattgccatgccattccatccgagcaatacttacaccattgatgagttaaatgccaacttgatggatattctggatgacgtggagaaaaaagcacagatcagcctggatggaaagattgatttcacactgaaagataaggtacacgatggaaaactgtatgtggaacagggaattatcgcaggatgtgccggtggtggatttgagaacatctgtgcagccgcagatattctgaaaggtgcaagcatcggagcagacgcattcacactgagtgtttatccggcaagtacaccgatttatatggaacttgcaaagaacggaacactggcaactctcattgagacaggtgccattgtaaaaacagcattctgcggtccgtgctttggcgctggtgatacaccggcaaataatgctttcagtatccgccattctacaagaaacttcccgaaccgtgaaggttccaagatccagaatggacagatctcttccgtagctctgatggatgcacgttctatcgcggcgaccgcagcaaacaagggacgcctcactccggctactgaatatgcgggaacatacagcaatccgaaatattactttgacggaaccatctataaaaacagagtattcgacagtaagggtgttgcggatccgtctgtggagattcagttcggaccgaacatcaaagactggccacagatgcctgcactggctgagaacctgatcctgaaagtcgtatctgagattcacgatccggttactacaacggatgaactgattccgtccggcgagacttcttctttccgttccaacccactgggactggcagaatttaccctgtccagaaaagacccggcttatgtgggacgtgccaaagaagtccaggtagcagaaaaagccatccagaacggtgaatgtccggcagaagcacttcctgaactgaaaccggtattcgaagctgttcatacaaagtacccacaggtggataagaccaatgttggtgtcggttctaccatctttgccgtaaaaccgggtgacggttccgcgcgggaacaggctgcatcctgccagaaagttcttggcggatgggcaaacatcgccaatgaatatgcaacaaaacgttatcgttccaacctgatcaactggggtatgctgccattcctgattccggaaggagatctgccgtttgccaatggcaattatctctttatcccagatgtacggaaagcagtggaagaaaaatgggacagcatcaccgcttataaagtgggagaagaactgacaccgtttaccctgacgctgggcgaactgaccgacgatgaacgtgagatcatcctgaaaggttgtctgatcaactactatagaaatgaaggaaacattcagtaggcagtatttaccatcaccgaaggtgacacggaaaactgaataaacgagaaaagccggatcccggagcagatgtacaccggggatccggctttttatgtgggaaaacctttttcgaagatatgtgagtattgttggtcttgcagtaattgtataaacaattataataaaaatgaatatatagacagtataaacaggaatattaaaaatataataaaaaaatataagaaaaatctttaaaaagtgttgacaaatatgaatctgtctgttattataaactcaacaaaaaacaaaacaccttatcaaacatcaacaccccattttctatgaaagagacgagaaatcttcataagaagaatggaaaaggaactgataaaaaaatagaatccgaaagatactaattaagaaagataattgaatcggatttccggaaggtttgggaggtaagatcagaacgtgaggtaacagatcttattcaaacgtggaaagaaatcaaaaacaatgttttcttaaatcagaacaaaaggatctgtattttctatcaggatggaaaagataagaacccaaaaaagaaaaggaggataaagccgttgtactaagaacataaacttatcattgtaagcgtggtaagagcaagcattccccgcacagaaagaccttttatgaagaatgaaaaaagaaaaaaagatgccagatcagagcatgcagattagataaaaggtaacaagagcttctccttacagtgaatacattaccacaaaaataatagaaaagattttaaaagatgtgtaaagaaacattttttaaaagaatatgagttcactgaatagacctatatagaaaccaaaatagtaattattcggaacgaagagaaaagtaaaatgcaaaggctatatccgatagcaggtgtatttgaaagagatcttaaaaaagatataatgaaaaacattctgtatagcataggaaagtgaatatccatattttgaaaaatttataaacgtcaattataaatttgaagctggctattattctttatatagatataacatttctaagtaagtaaacgaaaaaacttacgagcagggaagaaagagaaaatcaatttatatagataaaattgaataggaactctgaaaaaacattcctacataaaaaagtatataaaatatcctgaaaaagtaaagaaaacaaccgaaagaaaaataaaaaaataaaagaaagagaaaaagaggtttagacaattgaataaagaagatcattagaacagccgttatgtcgattaagatgagatgtagcggctgttcgtatttgtgcaatgaaatagcgaaacaatggagaaaagagaaaagccatggaacagggtttttcacattgtagaaaaggaaaattgcgtttataataaaagcctgtggatatttgtgaaagagaaaaatgtccggatatggatcggatatcgaaaacgaaaaagacatatccgagaacagagaaataaggaatggagcagagcgatggtaagatggtcggcagatgatatcatatacgaagatgaacagattcttgtgtgcaggaaacacagtgggatggcggtgcagagtgcgcgggtcggtcagatggatctggagagtgaattgagaaattacaggaatggaaattatattgggattgtacaacggctggatcagccggtagagggcgttctggttttcggaaagacgccgcaggctacggcatggttaaataaacagcatcagaatggtatgatgaaaaaagagtatctggctgtttttacaggcacaccagtaaaagaaaagcagggtatctgggaggattatcttataaaagacggaaaaaccaatacttcacgggtgacgggtaaaaaggatcggatggcaaaaaaagctgtactgtcgtacagaattatggactggagagatgacagaggactggcagagatccggctgggaaccggccgacatcatcagatccgtgtgcagatggcgcatcatgggatgccgctgtgggcagacggaaaatataagaaaaaagaagatatgctggaagcagaacagggaacggccattggtctgtgtgcctggcgcctggaatttgcacatccaaagaccgggaaaaaaatgaaatttgaagtacagccggaaggtgcatgtttccaggaattttcagaagcaataaaaccgtaaaaatgtttttgatgatgaattgtaactattcagtagccactgtaccgcgaggtgttttggcatgaatatgccaaaatcccgagacatacaagccaaaatgccatcaccgaaggtgattttaaatgcattttggcctgtaactgtgaaggtactgaacagttacgatgaatttaaaaaattagtcacaaaaaaatcaagaaaaacttaaagaacgcctatggactattttgaatggtcatgtataatagagacgatgtgaaaactttcgcgtatccggtgaaaaaagtatctgtgcaggtacaaaacagttatgtgccggaagcatattacataaggggaatataagatgagaagaaagataggaagaatattagcccctgtcatggcagctatgctggtatttggcgggtgtggaaataagacagcagaccgggtgacagaaaatcagactcataaaacagagaatgaaagtaacgagccggtggaaaaagaaccggcagaagatgaagatgaactgaaagaagaaaatcaggaagaacagaatacacaagatcaggaaacagatgttgaggaagaggaggaaaaggcagagattccggaagagagcaccctggatattaattatacatcggtggatggtctgcgcatggaaaaaggcagcaggatctctgtggtgattaaaaatacagaatccgattactggaaagcggtaaaaaaaggaatggagcaggcggtttctgatctgaatgaatatctgggatacaaaggtgatgatgcgatcacctgtaccatcgagggtccaaaggatgaaaacggtgtcgatgaacaggtgaatattttggatatggtactgacggagaatccggtggtggtatgtctgtcagcagttgatatgagttcctgtgaggcacagctggaggcggcacaggaagacggaattccggttgtcatgctggattccggtgtgaagagcgatgacgatctggtttatgcatactgtggaacagataataaggcagcaggcgaagaggcggcaaaacagttgtgtgaagcgatcaaagatgcgggtgaggtggcagtgatgtctcatactcagctttcccagagcagcaaagaccgcgtggaaggttttcaggaagaaatcacaaagaatcacccgaatgtcagtgtcgtcagcgtggattatcagccgtccaaggacgatgatccgaccgaggaagaatcgattgaggcagtgctggaaaaatatccggatctgaaaggatattatgcgacaaatcaggcgaccagtgaggcagtactttctgttctggacaaacacacagaccgttctgttcagatgagcggtgttgatatgggggatacccagaaaaaagcgatcgaggatggaaaagaagtcggaagtgtatgccagaatccgtacggtatgggatatgcaaccattgtggcaggtgcaagagcttcactgggtctggagagtgacaaaaaaatcgattccggttttcagtggatcgataagaatacgattggtctggaagagtacgcaagatatttgtattaagaggtggcactgctgtatatcgtgaaagttcttaagatgcggcggtggcggagaaaacagaaacaaagttcagaaaaaaaagatgcgggtatggagtttgcccgcattttctgtataaagggtacgaaaaaatgacgatggaatacaaatcaaactatgagaaagtgacagaagactggaaaaaacgttttctggatatggatcaggaacggctgatcgaacgttttcaattaaaccatgacggacagtggctgtaccttcgctatctggggcagcagctgaagctatcgcgtacatcaggaaaggttctgtttgcagacagagaagaaataccggaatttgatacggttattacggtatataatatgttttactatgcaaaagagcatccggcagcatccggggaactggttccttttcgcctggtgaaacgggtgtatccttttgaacgtgcctatcagaaacagattctggaaccattcgccagattattttccgggcatgtgaaagaactgcgggaagcgtgtgaaaaactgggtggtacaaaactgccacagggagatgcgggttatcggatcccggtatatccgtattttgatatggcggtattgttctgggacagagacgatgagtttgaggcacagggaaatatgctgtttgattctaatatcacggattttgtccatgaagagaatgtggtgtgtattgcagcggatgcagtaagatatctgtccagggcagcgggcctggaagaaatgaagatttatgcgggataataaataaagaaaagatatactggaagagataaggagagtaatatgaagattcgggcgatgcagctgaaagatatggaagaagtggttgggatgatgcgggtattttatgattctcctgcggtgatccatgcagcaccggacgagattctgagacaggatgtaaaagactgtgtgggagattgcccgtatattgagggatatatttttgaagaaaatgacagaatccttggatacagcatggtggcgaaaagctattctacggaatatggtggtatatgtgtctgggtggaagatctttacatgaaagaagaagcgagaggtctggggatcggaactgcatttttcagtttccttgatgaaaaatacaaggatcaggcggtacgattccgtctcgaagtggaggaagagaatgagcgggcggttgctgtctataagaaagcaggatatcatccgttgccgtatatgcagatgacaaaggaacagtagaagtgtaactgacattgaaaaacgaaaagtaactattcagtagccattaactgtgaaggtactgaacagttacaacgaaaaagcaaaagaaaacggggacagcagctgaaaatgatgctgtctccgtttttcttttattatttgatcagtgcggaaatttctctgaatctcggatgcatggatgtttccatcagttcaaaaagaattgcttcgtagctggtaacaacggcaccggcctgcgtcatccggcggatagcagtctgaagatcagaggattttcgggaagagacgcagtctgcaatcagaaaaacctcgtaacccagatgtaaaagatcgagtacggtctgttctacgcaaatatgcgcttctactccgcagacgattacctgttttttgtggaaatcctgaagcgtctttcggataatctcatctccgagacagctgaatgtccgtttctccagccaggaatctgtcccggctgcttcaaaaagagagggggaagacattcccagtcctttcgtgtactgctgggtgatcagaatgggaatgtccaggagacggagtcctttcaacagcgtttctgtatgacgcagagtctcttcgccgttctgcatggcgggaagaagacgttcctgttcgtcgatggcaagggcaatggcatgtggcagcttgattttcataaaatatgtcctccaaaagtttacagagtagggatcatgctttctagagcgtgtctgaaaaatcatttccgcaatctgcaagccccactttgcggtatattttaccctcattcggttgccgtagcccgatacgccgccctcattcggataaaatctcccacaaactgggactcgcagctcacgaaaagcctttttcagacacgctctagggtactataacataaaaatacggtgttgcatatattgagaaaaaggaaagaggtggatagcatgcggtatgagcagccgattcccttttacatggcgtatccattcctgcttcctctggatcaggaacaggcacaggaaaaggatctgcaggtgatgaagtctttttactcgcgccgggcagcaagaatacaggagaaggcagaccgggagtgtgaccggatggaatacgatggcagtatgatgtttgatgagtatccggacaaatttatgatggaacacctttgcaggaagatcgaacaggaggtgctgaaagaagaggaggggaatacgtctgtacttataatagaagagacctgtcaggggggacagggaagctgcggaaataaaagagaggaagagggactccgggatctgatcggagtgatcttattcaacgagatgtttcgcagacggagccgtcacagaagacagaaaaaattttattaacagaactttaatacaaatataaaatttgggtgttgtggtttacagggaaaaccattagaataagaaggtaaacaggaagggaaaacctgaaactgttttcaggaaaaacaagtaggaatcagcggcaaagccgcaggagaatatagatgacagaactgaagaaattattgagcatttatctggatctttatctgcaccagattattataagcggagcgagaacaaaagaaggggcgtccaagatacggattcgccccgtaattatgaaggacaaactgtattttcagtgtacaagcactgtgggtaccaaggaaattcatgaaaattatgaaaaagagcctttgctggaacatatagaaggctggatcaccgaagatttccggcaattgcagctggaaagtgaactgggaagtgtaaacgtactctcaagtaagaagggaaaactcacaattaaggaaaaaaagaaaaaaaaggaaggtaatctttgcgacaaaccgatccgcatggaagcgttgtctcataatcggaagaagcggtacattctggaagagggaaaaacggtagaatttctgatcgacctgggagttatgacttctgaggggaagattgtacacagtcgttatgataaattccgacagatcaatcgttttctggagtttattgaggatatccttcccaaacttaccagagaccgggaagtgacaatcctggattttggatgtggaaagtcgtatcttacgtttgcgatgtattattatctgcatgaactgcagcagtacgatgtacggatcgtcggactggatctgaaagaggacgtcattgaaaaatgcagcgtgctggcaaaaaaatacggctatgagaagctgactttttgtcagggggatattgcttcttatgaaggcgttgatcgggtcgatatggtggtgacgcttcatgcatgcgacacggctacggattatgcgctggcaaaagcggttgcctggggagcttctgtgatcctgtcggtgccttgctgtcagcatgaactgaaccggcagattcacaatgaagtgctggctccggttttttcctacggggtgctgaaagagagaatcgccgcgctgatgacagacggtctgcgggctcagatgttagaacaggcgggatatgacacgcagattctggaatttattgatatggaacatacgccgaagaatctgctgatccgggcagtctataccgggaaaaagaaggaaaataaagaacagcttcgtgcctgtctggatgcgttcggactgcatccgacactggaacggcttctgaaagaaggaggtcgggaagcatgaaaaaggggttattaaaagcgggagtactgttgctgctgtttgcggcagcgctgggaggaacagcagcactcatcaatcgggaaaagatcgtgggaacgagacagatggaggatgcaagtcttccgattctgtatatggaagttgcggatacaaaggtgaatccgatgtatggatatgccagtgaaatggaagaacagtatatgcgcgacagtctgacaccacttccgacggacagaagtctgacgatggcgatagatccgaagaatgcatcggtaaagacggtgagctaccgtgtatcgacggcagacggaacggaagttgtggagacaagcaagatcagcaagctgaagaagaaggacggggagatcagggcagaatttcagctggaaacaccgatcctgatgaaccaggaatacacgcttcggtttgatgtgacactggataacggggaaacgtattattattacacccgtctgttgcagcgggcaggaaccaatatttcagaatatctggaatttgcagacagcttttatcagacctgtctggatcccgagaatacatccacgctggcggcttatctggaaccggatgagacacagaccaacagcacctatgagaatctgaatatacattccagctttgaacggatcacctggggaaccctggatatgaagctggaaaaaaaggcagtgccggtgatcaaagatatgaatgagaccacctgcagtatctatctgacgtatgtgttgtcagatactcctgaggatgagacgacagattattataatgtgaccgatttttaccgaatgcgctatgcacagtcccgcgtgatgcttctggattttgaccgaaatacacaggagttgtatgacggaaaacatacggaactgaccagcaaagggatcgatctgggagttgtggccaaagatgttcagtatcagtctaataaaagttcggatattgtggcatttgttcaggaaggagagctgtggagttataaccgcagtgccaataagacaacacagattttcagtttccgggatggtgatctggatgagcgggagaacctgcaggaacatggagttaagatcgtccgggtggaagaatccggagatattgattttgttgtatacggctatatgaaccgggatgtacatgaaggagaagtggggatcgcggtttaccattacggggcagagctgaatcaggtggaagaagagctctttattccgatgaagagttcttatgaatatctgaaagaagacatggaacttctgtcttatgtgacccgggatgatatgctgtatgtcattctggaagatgatctgtaccagatcgatatcaagcagaagagttttcagattgtaaaagaaaaactgatcaaagaccgatatgtggtctcaaagtctcaggcgagccttgcctggatggatcaggaagaggaaaatgcatgcacacagatcacggtgatgagcctggagcagggagatacctatacgatccaggcacagtccggacagaagatcaaggcactgggatttatgaatgaggatttggtgtacggaattgccaatgacagtgatattgtgacagataatgcgggcaatacggtatttgccatgaacaccgtccggatcgaacagtttggcggcgaagtggtcaaggaacatcatgaggacaatgtctgggtcagcaatgtgaaacttcaggaaggtctgctggaactggaacgggtacagtgggagaacggtgcatatgtggcgatcagcagcgatcatatcatgaataatcttcagatcagggaagagcagataaccctgcgtctgatcactacagaacggaaagccacacagatcggtctggactttgaaaaaagtgtgaccagtaaaaatgtactgtatctggcctccaatctggaagaccaggagacttacaatacactttccatggagcttacaagaacagattccaatgtctattatgtctatgcgaaaggaaaactggacagtacctggagcagggtcagtgatgcgatcaaacaggcagatgcgcagatgggcgtggtactgaatcggcagcagcagtatgtctgggagcgaggcaaccgccaggaaagttatcaggcaaatcttgatgaagtgccggatgtggttctgagcggaactattgatgaaaataccctgcagcagtctctgggcgcggattatacggtgatgaaccttaccggatgttctctggacagtgtgctgtatcaggtcagcaaaggaaatccggtaattgcaaaggtatctgatacggtaaatgtggtaatcataggatataacagcaaaaatacgatcctgtactatccggcaacccaggaacagggttatttcggtatgcaggacagcaccagcctgtttgaaagcgctggtaacgtatttgtcggctatatggacaatcttggtgcggcgagcaaaagcgaataaaagatatgaaaaacactccgcaggatggttgactgttgaatggttacaatgatacaataaatgcaatatgggcagtttgcaggtacgggcaggctgcctgagaaaacatcagagagggaggacttttgttatgcagcttacaactgtaagagaaatatacaaaaaccgggaaacattcctggacaaagagattactgtagggggatgggtacgaagcgtacgtgactccaaaacatttggatttatcgttctgcatgacggaacattttttgagaccttacaggtggtataccacgattctatggagaactttgcagagatttccagactgaatgtcggtgcggccatcattgtaaaaggaacactggtagcaacaccacaggcaaaacagccgtttgagatccaggcaactgagatcagcgtagagggagcttcagcaccggattatccgctgcagaaaaaacgccacagcatggaatatctgcgtacggtttcacacctgcgtccgagaaccaatacgtttcaggcagtattccgtgtgcgttctctgattgcctatgccattcacaagttcttccaggagagaggatttgtctatgtgcatacaccactgatcacaggaagtgactgcgaaggtgccggagagatgttccaggtaacaactatggatctgaacaatattccgaagacggaagacggaaaagtagatttttccaaagacttcttcaataaaccgaccaacctgacggtaagtggacagctgaacggtgagacttatgcacaggcgttccgtaacatctatacgttcggaccgactttccgtgcagaaaactccaatactacccgccatgcagcagaattctggatgattgagccggagatcgcttttgcagatctggacgatgatatgattctggcggaatccatgctcaaatacattattcgttacgttctggaaaatgcaccggaagagatgaacttcttcaactccttcatcgacaaaggactgttagatcgtctgaacaacgtggcaaattctgaatttgcccgtgtgacttatacagaagctatcgatattctgacaaagaacaacgataaatttgaatacaaagtatcctggggatgcgatctgcagacagagcatgagcgttatcttaccgaacaggtatataaacgtccggtatttgtcactgactatccgaaagatatcaaagcgttctatatgaaactgaacgatgacggaaagaccgtggcagcggttgactgtctggtaccaggtatcggtgagatcatcggcggaagccagagagaggatgattacgacaagctggcagcccgtatggacgagatgggtctgaacaaagaagactacggattctacatggatctgagaaaatacggaagcacaagacatgccggattcggtcttggattcgaacgttgcgtgatgtatctgacaggaatgggtaacatccgtgatgtcatcccgttcccgagaacagtaaacaattgtgatttataagtaattatgtaactgttcagtaccttcacagttacgagccaaaatgcatttaaacgataaaaacacgctttgcgagtttttatcgttatcgcggcactcctcaaggttccgtgcaagcacggactttgactcgttgctcgcgtaaatcaccttcggtgatggcattttggcttgtatgtctcgggattttgacatattcatgtcaaaacacctcgcgggacagtggctactgaatagttacgtaattatacagtaacaggagaggctatgcgatttattcatatggctgatgtacatttgggggcggttccggattcgggctgcccctggagtgcattcagggaaaatgaaatctgggaaacctttgtacgggtgatcgaccagatcagagaagagaaaatagagttgttgctgatcgcaggagatctgtttcacagacagccgttgccttctcagacagagagagtcagtcagctgtttgcatccataccggataccgaggtggtgtggatggcaggaagccacgattatctgcgggaagactcagcgtatcgtaaggtgaaatggacgaagaatgttcatggattcctgagtgagaaaccggaagtgatcagtctggaaaagctgcatacgaaagtgtatggatgcagttatgagcattcggaggttacggaagcgatatacagcagcatccggccggaggatcagccggggattcatatcctgctggcatatggtggagatgaaacgcatattcctatgaaaaaagaggatggagccggttttgactatgtggcattggggtatcgccatataccgggagtactggtggaaaatcagatggcatatgccggttctccggaacccatccgcctggaagagacaggaacccacggggttgtctacggagagatcacagaggacgaacaggggcagcatcatacacagatcacactggttccctgtgcgtgccgttcgtatattcctctttcactgcggattcattcaggcaccacacaggcggctctggagcagaaagtacaggacgcgatcgcacagaaaggaagcgaagatatctactggctcaggatccagggatatcggaatccggaactggagtttgaactggaggcactgcgcgcctatggaaatattgtaaaaataacggatgaaacccgcccgtgctatgatctgaaccgactgaaacgggaaaaactgggaacgaaaaccggtgcatatatccactggttcgagaaaaaacagggaaaagtagaacagaaagcactggattatggactgcaggcactgcttgccgaagacggggatgaaagagaggttctttcagaaaagataacgggctggcaggaaaagaaacaggaattgcaaaaggagagagaaagtcggagtgcggtggtagaacaaatgatgcaccgtatcatgcgggaacgctccggtctggaacaacagcagttggtcaatggttccgagatccgccgtctggaactgaaccggaatgcaacagaaaagcacctggagcaggaacgacgggaagaaggaaaacgacaggcagaagaaagcagacagccaaaaagcgaacagcccctgaatccggaaagatcggtagcagagcaacctgttcagacacgaaaagtagtcgggggaaaagaaagaaagctattggatattcctaaaattcccaaaatttccgaaatatttacatggacaggaatcgcacttgccatattgatcctgatcgatccgttttcctggaatcgggctgtgtgtacggtgcttggccttttgattctgacgggcactctgatgggaaggatgtatctggtaaactggcttcgaaccagggacagtatggtcgtgcaacggacagttgtgcgggatgaaccggagcagaaggaggacacggaacaggaagagttacagaaggactgggaagaacgattaaaagaaagaaagaaggaactgcgtcagatcagtcatcagattctgcgactgcaggagcggggagttcatcttgcgacagaggcggaagaaaagaaaatacagacagaaaatctgcaggaagagatccgggagttgtcttgtccgacctgggaggaagaatcctgtgatatggagatttccggtcttaaactggcacttacggtgctgacggaggaagaaagcatacgacatgtcggagatcggagtgaacggaaggaaaaggagagagaatgcttagaataggttgtcatttgtcctcgtcgaagggattttttcatatgggaaaagaggcggtgaagattggagcgaatacctttcagtttttcacccgaaacccaagaggaagcagagcgaaagaaatagatccggaggatgtgagaaagtttctggaatatgcgcaggagcatgatatctgtcagatcctggctcatgcaccatatacactgaatccatgttctaaggatgcaaagaccagggaatttgcctggatgacgatggaggatgatctgaaacggatggagtatgttccggggaactgttataattttcatccgggaagtcacgtaggacagggcgcacaggaaggaatccggatgatcagtgagatgctgaatcagattctgaagaaggagcagcacacgacggtacttttggagacgatggcaggaaagggaacagaggttggtcggagctttgaggaactggcgcagattttggatcgggtggagttgaagagccatatgggtgtttgcctggatacgtgtcatgtgtatgacgcggggtatgatctggtgggacagctggatcaggtgctggaggagtttgaccgggtgatcgggcttgagaggctgaaggcgattcacatgaatgacagtaagaatccgtttgcgagtcataaggaccggcatgagaagatcggggaagggtcgatcgggttggaagcgtttgagaggatggtgaatcatccgaaactacaggggattccgatctatctggagacaccgaatgaactggaggggtatgcgcgggagatccgggtgctgagagagatgaagaggtagttgaagttgacgacgcggacgaaacgtgcttcggctttctgctctggcaacgtgggcagggcaactttgagctaatcaccaactccgactatgttcacgagggtcggctgaccctcgcgaaagtctgcgtaggtgctggatctcaaagcttgccctaaccgcccgcaaagtgttgcctgagcagaaagccgaagcacgtttctgggtggtcaactgggggaggattgagtggctgcgagggaggtttagggaaaagggcacgggaaggattacggttgtgggaagtgatccttcccgcgtctttttgggtaggttatgaaaagaaaaaagagacatattaacgaaagaatctttgaagtgagagtttcgtcggtatgtctcttttgtgttagatatttcataaatcaggtaatgccagtgtgcctggcattacttgatttatcagatcgtctcgttatttctgtatttggtcaggactttctggatgcgttctaccgggttcaggagtttgctgatggaatcgtcgtgattcagggtgtcgatgatcagggcgatgtatttgctcatatcgcagttgatatagtaaggtttactcagcagttccggggtctggtagatcaggttggtggtcaggatgcggtcgaaggtccctttttcgtaggcttcatcgaactttgccatgccgttggtgaacagaccaaaggtggaacacatgaagattttgttggctccccggtctttgaggagctgagctacctcgagcatgctgtcaccggaggagatcatatcgtctacgatgatcatatctttgccacgaacatcagctcccaggaattcatgagcaacgatagggtttcttccgtctacaatagtagagtagtcacggcgtttgtagaacatacccatgtctacgccaaggttgtttgccagatagatggcacggctcatgccgccttcatccgggctgatgaccatcagatgttctttatccagtttcagatttttttctttctttaagagatttttgataaactggtatgcggactgtacagtttcaaatccatacagtgggatcgcattctggattctcggatcgtgagcatcgaaagtgatgatgttttccacacccatctggatcagttcctgcagtgccagtgcacagtcgagggactctctgccggtacgtctgtgctggcggctctcatacaaaaatggcatgatcacgttgattcgtctggcttttccggcgatggcagcaatgattcgtttcaggttctgataatgatcatccggggacatatggttggtctgtcctgccagagaatatgtcaggctgtagttgcagacatctaccagaatatagatatcatcaccacgtacggattccttcaggataccttttgcttctccggaaccgaaacggggaagatcagacccgatcaggtaagtatctctgtcgtagccttcgtataaaacaccttcattgtggcgtttttttctccagctgaccaggtagttatctacctttgtaccgagttcggcgcagctgtaaggagaaatgatccccagtcgtcctacaggaagctgttgtgaatcgtgatttttgttgtgtgacattgttagtttcctcctaatatttttttctggattcttatatctttaccgatgagttttatcatcgtgtagttactggaaactctggaaaatacccgttcggagtaggtatccataaaactgcccagtgtcagattggtggaaatcaccgtggatttctttctgaggatccgttcattgatacataaaaagaactgagaagcaacaaagctgttggtaagttctgttccaagatcatcgatgataagcagatcacagttgagaatatagtcattttctccttccgtggtatcagagttcgagaaggtgtttcttgcgaacgcatcgaacagatcgaaagcagaataatagatcacgctgtgcatcgaatccaaaagttcttttgcgatgcagtacgtaagaaaagttttcccaacaccggtatcaccgtaaatgaaaagattttcaaaagaatgatcaaagttctgaacgaaatcttttgagcgctgcaatgcggttgcggcactctgccgggcggtctgtcctgtggcttcgtttaccatatcttccggataataatccagagaaaatgcatcgaagctggctgtttttaataattctcggatattggactgtgtatacagatgttcactgatcgcacgtctgaagcagatacacttccggttgtccacatagccggtgtcctgacacaggggacaggtataatgcatcttcagataatcctccggataaccattggcttttaacagatcggttcgctctctggataaagcctgaatctgttcgttcaggtcaaaatcagtggcgtctttatcaccgagtaagattcgtgcttttttcacactgatcgctgcaatctcctgatcgatcagtgccagccggggtatcctggcctgtgcttcggcgatacgggcatcttgttcatgtttattgcgaaactgcaatcgctgataatagcgcatcagtgcatcgtactgactgttttgtagtgccacggtaattctcctttattattttaaaagctgattttcaagttgatcgtaatcataatttcgctgctggaaattattgaatctgttaccggaacccgatggacggattcccttctgttcctgccgctgcttttgttcctgacggtcgctttgcagctgtctgtgcaaagtatccagagcctgaatatcggtcagatgtcggacacctttatccttccagccggaaagaatcctgtccgcatagcggaaattggctttcccggtggatgctactgtacgggaacaggcttccgtgagaatgtccatagtaaatccgtaatctttcatccagtggtcgatcatgtggatctccgactggatcggattacgattgctgattccgaatgcttttaaaattgaaaaatagtttctgtgataggtcgtagtctcctgcttggcgcgggtaactgtgtcgatacctgcctcgtgccagctgaaggctactttttttatataatgaatgtctttacttcccttggaaacacagtattcgatcagatagtcaaacagatccacagaaaaatgaagctcctcgtaaatataaagaagttcatcggtaactgttcttgacagtgtagtaccaaggtaactttcggccagaaagagaatctggcgaacgtcttcctgttcgcggagctcttttagacggtcagcactcattgttttttgattccctgttgtctgagagggctgagtgcctgtctgcgaggcattcctggcaggtgtgacagatgctccggctgtcgacgatgagccggatgtgacggtgtttgtcgatgtggcaggcgaaatctgagtaattgcctgttctgccagtgtgttttgcaccgtatccggcaccatgggctgcagaaaatcaatggaagtctgggtgtcggtacctgccagtacgaccagtttctgattctcccagtaacgaagggtgcgaagcacatctgattctgtgcagtcaaaaacatccgctacagcagccaggtccagtgcggtgtcgccgctttgcagactgcggagcagataaaggtaaattttaacgaattccccgttggcgcggggcatataataatctatgaaaatattggaaataatggtaactccgctggagcttccattatgtaaagataactgcatagttctcctgtaatagaaaagtgatggtatatgtcctggttacgtgcttattatagcatgattctttaagaaatcaaacatggttttttatgggaaagaggtggaaaataagatgcgatgggggattagctggtgtgtaagtaaggtggataagcatgtggatgatgtggataagtggtgggaaattatgaggtgtggggattatttgcaaccggaaaatggaggaattgtttgaaaaacagagaaaattcggagggaagagtgtaagattatgtaaacagagttatgcacaggggaatccacagaggtgggaactgagggtggggataaatgtgtggataatgtggataagttgagaaaaaaatggtgtgggggtgaaaagggacggatccgaaagcggtctgcaacatcaggaggcggcaacgcgggcagggcaactttgagctaatcaccaacttcgactatgttcacgagggtcagcggaccctcgcgaaagtctacgtaggtgctggatctcaaagcttgccctaaccgcccgcaaagtgttgccgcctcctgatgttgcagaccgctttcggatcctgattttcacgtggggaggggtggttgaatccgattgtggatggaaggaaaagcataagaagaaaattacagggtacggagcaggcgaaaggatcaggggatttttacatataaaaatggcaaccggacatattaggttgccatttttgtatggggtaaaagaaggttttcttggtgtttatttgcccaggagtttttcgccgatctggtagacatcgccggcgcccatggtgatcaggaggtcaccgggctggcagttttccagaaggtagttttcgatttcatcgaaggttgggaagtattcacagggagttcccagttcctggatttttttttgaaggtcggcggaagagatgccgagggtgtcggtttctcttgcggcgtagatgtttgccagtactacatggtctgccagagtcagtgcttcggcgaattccgggagcagagctttggtacgggtgtaggtatggggctggaagatacaccaggtctttttgtgcggatagtttttggcagaggtcagtgttgctttgatctctgtcggatgatgggcatagtcatcgatcacagtgatatcgccgatgtttcctttgaactggaaacggcggtcggttccggtgaagttgatcagacctttctggatcgttgcatcgtccatacccagtttttcacccagagcgatcacggaaagggcgttggacacgttgtggataccgggtaccttcagggagaaggttcctgtggtttcaccgtgatgcagacaggtaaaggtcgggtgaccgaaggtatcgtatgtaatatcggttgctgtataatcagcttcatgttccagtccgtaagtgatgacttcgcatggcagatccctgatgatatcctcataatgaggagtatcactgttgatgatcagggtaccgtcagccggaagcttttctgcaaacagccggaaggaatggcggatatcgtcaatatccttaaagaaatccagatgatcggcatccatgttcaggatgatactgattttcgggaaaaagcttaaaaagctgttggtatattcacaggcctcggtaatgaaagtaccggaatgtcccagacgcagattaccgccgatggccggcaggataccgccgacagagattgtcggatcaaaaccaccttccagcagaatatgagaagccatggaagttgttgtggtttttccgtgggttccggatactgcgatggggatctggtaatttttcatgatctgtcccagcagatcggcacgggtcatcatcggaatatttttttcttttgcgcaggcatattccgggttatccggatggatcgcagcagtgtaaaccaccagatcgataccgtcaataatattggatgcgcgctgtccgtagaaaatctgtgcaccgtttgaagtcagatgatccgtcagagcactttctttggaatcagagccggatacggtgaatccctcttttaaaagaatctcggcaaggccgctcatgctgataccgccgatgccgataaaatgtatgtgaacaggttttgtaaaatcaatggtatacataggagttctccctttcttacagacgtttgtatcgtatttatgatgccggatcccctgggtcggaaagattgcgaaagctactttcagcgggcgatttgcaggcaccagtcgggtacaaaagacattttgtaacaacatttattatagacggaaaaggggaaaatggaaagatttttttaaggatgagaaaaaaaaccaatagatatagaagaaaatgacgaaagagagaagaagtgttgtataaatgtcataaaaacacgaaaagatttgataaaaatatgtaaaaaatgttcactaaatctgataagtgtgatataatctttttactatatatgacaagaggtgattgcatgatcaagaaagaaatgattgcaatgctgttggccggaggccagggaagccgactcggcgtacttaccgagaaagttgccaaaccggcggtggcatttggaggaaaatatcggattatcgattttccgttgagtaactgtattaattcaggcattgataccgtgggtgttctgacccagtatcagccgctgcgtctgaatacccatatcggaatcggtattccgtgggatctggaccggaatgtgggcggtgttaccgtgcttcccccctacgaaaaaaatggtaacagcgactggtataccggaacagcaaacgcaatttttcagaatatggcatacatggagacctataatccggactacgttctgattctctccggtgaccatatttacaagatggattacgaagtgatgcttgattatcataaggcaaataaggcagatgtgaccattgcctgtatgccggtgccgatcgaagaggcaagccgtttcggtgttatgatcactgacggcgcgggacgtattaccgagtttgaagaaaaaccggaacatccaagaagtaatctggcatccatgggaatttatattttctcttggaagacactcaaagagtctctgatggcactgaaagatcagccaaactgtgacttcggtaaacatatcctgccatactgcagagataatggaaagagactatttgcctatgaattcaacggatactggaaagacgtaggaacactggggtcttattgggaagcaaatatggaactgatcgatatcattccggaatttaacctgtatgaagaattctggaaaatctataccaaaggtgatatcatccgtccacagtacatatccggggaatccgttgttgaaagaagcatcatcggtgaaggtgcggagatttatggtgaagtgcataattgcgtcatcggtgcggatgtaacgattgaaaagggagctgtggtgcgggattccattattatgaaacatacacgcatcggcgccggaagccagattgacaagtccattatcgcagagagtgtggatatcggagaaaatgttgtcacaggtgtgggcgaggaagctccgaatgttctgaaaccggctgtctatggattcggccttgttacaatcgcagaaaaatctgttattccgtcaggcgtgaagattggaaagaacacagctatcagcggtgagaccacagtggaggattatccggacggagagcttgtaagcggcggagcaattgtaaagaaggacggtgagtaatatgagagcattaggaattattctggcaggcggtaataacaacaggatgagagaactgtccaacagacgtgccatcgcagcgatgccggtagcgggaagctatcggagcattgactttgcactgagtaatatgaccaattctcatattgcgaaagttgcagtcctgacacagtacaacgcaagatcgttgaatgagcatctgagctcttccaaatggtggaatttcggaagaaagcaaggaggtttgtttgtgtttacaccgacgatcactccggataacagcttctggtatcagggaaccgcagatgcgatttatcagaacctggattttctgaagagaagccatgaaccctatgtggtcatcgcatccggtgattgtgtatataaactggattataacaaagttctggaataccatatcgcaaaacgtgccgatgtgactattgtgtgcaaggatgtggatgccaatgaggatgtgaccagatttggtgtgcttcgcatgaatgaagactaccggatcgaagaattcgaagagaaaccgatgttgtctgattatcatacgatctctacaggaatctatgtgattcggcgccgccagctgatcgagatgatcgagcgctgcgcacaggaaggaagacatgattttgtaaaagatatcctgatccgctataagaatctgaagaggatctatggatataagattcaggattactggaacaacatctctaccgttgaggcttactacaagaccaatatggatttcctgaaaccggaagtgagagattatttcttccgccagtatccgggaatcaattccaagatcgatgatcttccgccggcaaaatataatccgggatgtctggtaaagaacagcctggtatccagcggctgtatcatcaacgggcaggtggagaattctgttctgtttaagaaagtatatgtgggaaataactgcgttatcaagaattctattattctgaacgacgtatatctgggtgataatactcatatcgaaaactgcatcgtagaaagccgggataccatccgggccaattcttactattgcggagaaggcgaaataaaagttgtcgtggaaaagaacgagcgctatgcgctgtaataacagagcagctgtctggtggttcgcggagaaataactaatcagcggctataactgttcggaaggagaacgacatatgaaaggggcatgtgctatggagattacagacgtaagagtgcgcaaagtgacaaaagaaggtaagatgaaagcagttgtttccataacaattgatgatgaatttgttgtacatgatattaaagtaatcgagggagagaaaggactgtttatcgctatgccaagccgtaaggcttccgatggagagtatcgcgatattgcacatccgatcaattccaacacaagagaaaagatccaaagtctgattttggagaaatacgaggaagtaatggcagaagatgccgttgcagataatgcgtaaccggattgtcatatatatggggtgacgcaaaaacgagataaaagcggtggctggggggccaccgctttttctttacaaaatgccagagtcttgctatagtggaacgtagaaaaatgtccgtgggcgaatggcggaagagaaagaaaaagaggagacaggtgtgtaatgagagtggaactgccggaaagctttgaaaagagaatgcaagagatgctgggggatgaatacgaatcgtatatcgaaagttatgataaccccagacagtacggactccggatcaatccgatgaagatcacggaagaggaactggcggaaggctccggtttttctctggatccgatcccgtggacaaagaccgggtatttttataaagaagaagatcagccggccagacatccatattacagtgccggtctttattatctgcaggagccaagcgccatgactccggcggcgaggtttccagtggaaccgggggagagagttctggatctgtgtgcagcaccgggaggaaaggcaacggcactcggcgcagcgcttcagggaaaaggtgtgctggtggcaaatgatatcagtaattccagggctaaagcactgttaaagaatctggaagtatttggcatatccaacgcctttgtgaccaacgaagtaccacagaacctggcagagcggtttgaaggattttttgataaagtgctgatcgatgcaccgtgctccggggaggggatgttccgcaaagatccggcggtgatcaaaacctgggaggaagaacgcccggagtactttgcaaaactgcagaaagatattctgaagaatggtgtgcggatgctgcgcccgggtggaaaactgctgtattccacctgtacctttgctccggtagaaaacgagggaagtatctcctggatcctggagcagtgtccggagatggaactgattcccatcgaaggatatgaaggattctccgagggtaaccctgcgtggggtgatggaagagaggaactgcgccgctgtgtgcggatctggccgcataagatgaaaggagaggggcattttctggccctgctgaaaaagtccgaggatgcgcccgagacaaggatcagactggaaccgccgacacggatggataagaaaaataaagcagttctggaagaattcttcagggactgtcagtggaaaccggactgggagcgggtacagatcaagggcgagaaagtctacctggtaccggagcttccggcaaagttgaacgggatccattttttacgaaacggactgtatctgggagatctgaagaaaaaccgttttgaaccatcccagcagctggcgatgacgctgaaggcttccgactatgcgggaagcgtatccctttcaccggaggatgaacggatcggacgatatctgcgtggagaaaccctgcttttggaaccgggggaagcgaccagagagaaaggctggatcctggtctgtgtggatcagtatgcactcggctggggaaaacttgtgaacggagttctgaagaataaatactggagcggctggcggctaaaaagttgacataatccgcactttaatgcagaaattcgccaaaactctactaattattacgcaaatattacgagatgttaaaaaactacttcacaatgctacaaaatcatgctataatgactcttgcctgagaaagtgagaggaattaatatgagaagaaaaagaatcataagcctggtactttccgcatgtcttatcgtgggaagtgcggtacagggtggagctgctacgacgcaggagaagatctccgatgcgaaggcacagcagcaggcgaatcagtcttccctgcaacagacccaggaaaagattcaggaactggaatcaaaaaaaggtgaatccgaaacatatcttgcagatctgaacactcagttggacgatcttcgcagcagtctggaaaaactgcagaacgattacgatgcgaagcaggaagaactgacacagctgcaaagtgaccttgaagatgcgaaagcggatgaagcgcagcagtatgaagcgatgaaactccgtatccgctatatgtacgaaaactcagccagcaattatatgaacctgctgttcgaatcaggaagtatttctgatttcttaaaccaggctgagaacatttcccagatgtcaaagtatgacagagacatgctggatacatacagagaaacaaaagaagccatccagaccaaagaggaacaggtggcacaggaaaaagaagagattgtggctcttcagcaggagagcgcggacaagcaggcggcagtagaagaactggtggaggcaacttaccagcagatccgtgaatatcaggaagatattcagagccagcagacagcagagaatgatctgttgactaagatcagcagtcaggaagatgcgatcaacgaccttcttcgtcaggcaaaagaggaagaagcagcagccagattagcagcacagcaggcggcacaggcagcagctgagaaagcagcacaggaagcggcagcaaaagaagcggcagagaaaaaagcggcagaagatgcagcagcacaaaaggcagcacagcagaaagcagcgcagcaggcagcgtcagcgacacagaaaaaatcaaacagcagtacaacaacgactacaacgacaagtaatactgttgcgaatacaacaacttcaacaactacaacagacagctccgacgataccatcgatacttcacagggcaaatacctgggaagattcaaactgacagcatattgcggctgttccatctgttgtggaaaatggtccggcggcggtacagccagcggaactactccgacaccgggacgtaccatcgcgatggcgggagttccattcggaaccaaactttccatcaacggtcagatctataccgtagaagacagaggaaccgcatacggacatgtggatatcttcatgggaagccacagccaggcattgagctttggtatgaaatatgcggatgtgtatcaggtgaactagagaaaaataagaacagagagtgcaggatacgggaaacgtgtttgcactctcttttttcgcttacaggagactgctttcctgttcataatccggcttccggctgcatagaatgcagatagtttcatagctacgaaacaaaggaggggaaaagatggatgccacgattctggtaaaccgtacacaccgcttaccgcgaaaagcgataccacagaccttagttgagccggaaatcatctttgatgcacctgtcggggacaggaaaagattacttgcagtcagtgcagcgaagggagtggaggcactttttgcgagaggaaaagaggaaggaatctatctgtgcggagtatccggctatcgaagttatgaaagacaggaagaactctatcagaagaaactgcgggaacagccgaaagaaaacgaaggttctgtacattggatagcaccgccgggagccagtgagcatcagacgggtctggcactggatgtttcctgccaggcggttgactatcaactggatgagcgtttcggcgaaacccgggaaggccggtggctgaaacggtgtgcacccttatatggcttcatcctgcgctatccgaaagggaaagagcatataactggatatggatgggagccctggcatatccggtatgtaacccggtcgctggcgttgtatctgacacttacagggctgacactggaagaatattatgagcagaagtaactattcagtaggtagcattccgcgaggtgttttggcatggtttttgccaaaatcccgagacatacaagtcaaaatgccatcaccgaaggtgattagaaatgcattttgactcgtaactgtgagggtactgaacagttatgagcagaaataaaatgaggcggaacgccggcaaaagatgctggtgttccgccttgttgttacattgtatatcattaattgttcatagtgaaggtcagatatcgggctatcatttctgctacctttgcatccgcttcggaaatcggatccgtgcgcttcatgccaagaaaacacacggccccgaccggatccccgtcccgtgtcacaggaaccagcgcctgttccgtgtgcgcatcatcgtctgtcaccggataataagcgttattttccgggataaaatcccggtcaaagagtcgctgctccatcgctttactgagagatttcccctgatacttcttattctccggcccggccgcggccaccacctgctcctgatcacagatgcaaaacaacttcccgcacgtcttcgccgccgcatccgccagctgctgcgccccgctcgaaaactccccgatcggcgaatatttcttcagaataatctccccattccgatccgtaaaaatctccagaggctccgattcccgtatcttcaacgtccgccgtatctccttcggaatcaccacccgcccgagatcatcgattcttcgtacaatacctgttgctttcatagactttctccttatccgtataaatatgatgtgctaaacctggttttagatgaaattaaagttctggtgttagtattggcggatttctggaaattatgagttgaaatggtgggttttgggaaatgtggttttagaaacagaaaatttttgttttttaaaaccgggagagggatggaaacatctgataaggggtgatggaaggagaaatagtgtgagttgtacgaagaaattacagttaaagattatataatgaacaacaattacgagatggtaatatgctatgcgatatggtacaataaaaatagtttgattatgaggagagataaacataatgaaaaagaggttgataggaatagatgttataagaatactgtgtgcgatactgattttgttttttcacttgggaggacgtggaatagaatttaaaggctggaatgaatggattggaaatcaagtggaatttattatgattttattttttatgatttctggtttctgcctatctttttcaaaacggaatttaagtggaaaaaatgagatacttgacttttataagagacggatattgaaattattaccactttattgggtgatagagatatatttgttaattatatcaatatattatggaagtgagtggataaatagaataaaaattcttccgataagattattaggtttgcagatggcctatccggtagaagtatatgttggggtcgattggtttattggaagtattatgatgtgctatcttatgtatcctattatccaaatattgacagataagctttcaaacgagaaaagatatatggtttgcattggtgggattgtagtattattttattcgatgctgatgaaagaatggtttcctggaacggatttatactacaatacattttttagatttttagaattctcaattggtgcagtaattctacataatgtggaaattatgaaagaaaaaaataaatatgtaaaaaatatagtaaattggcttggattaattgcattgctaggggtgatttcgcatagaaatgacaattggatatggttatttgtccaattattatttttgccaataataattagtgtagctagtaacgtatatttaccaagatatttagaaaaaatgattatgatattaagtggatgtacatttgaaatttttatatttcaggatgttatcttttccgatccatttatcaataaagtaagaatgatagaggggaacagttctaaattttattattttataatatgtatgttaattctttgcatgggatggaagggattttcacagattataagtaaaatatatatcagaaaaaaaggtaagatataaaagtaagtagtgattttagatgataaatttgaattccttaagctcagatgctagaatggatagaagagtgtgaaaaggataatataaaggaaagacattttgttaaggtgaaaaaatgcaggcaaatatatatgttagtgtattaagcatattggtgttgttaattctcttttttctatttggctctatgataacgtgcagaattaaaaaggatgatttttcgttgcttttgagtataaatattggatttatggtatattttgccacttttgagattgttgctttaccaatgaagttgttattacaacccttatcgaaattatcaattatgtggggaatagtatgtttaattgttagcagcatttcgattgtagtaaataaaaatgaatgggtgaaatcttttagaaatgtagaatttaaaaatactattcgaaatagtgtaatagtttgcattgttttgggtgcgttaagttatttaataacaaataatattcagtacggtagcagtatagattcggcatattatattggaatgtcaagttcatctgtttatacagatacaattgaacaatataatccatatacaggtgtaaaattggaaacactggatccattgtatttaatacttacatactcagtacataattcggtgataagcatgataacgaagatccatccgttaattgcatatagatttattatgtcaacagttgttatcgtcattacgggggggaatttatataatatagcagcagaatttttgaataagaacaaaaatagattgttggagacttggtttctgatggtcgtagtgtatatgtgtggttattctatgtattcacctacaggtttttttgcatatagaacatttgaaggaaaaaccattctggcggttattgtgataccgacattgctattgttattgatacgtacgcttaagaaaaaaaatagtatatgggattggtatgcaatggtttgcactttgataggtggaatggcgttttccatgtcagcaatgttattaatgccaacacttatttctatgtactatattcctgtgattttaagcaaaaacaggaaacatgttatatggaaatatgtggccagcatggtgatttgtgcaatgtttattgtgattcatttgtgcatttcaaagaaagttatacaaataaaaattttataagaaaagagaaagtgatgcagggaattacagcggaaggatatggatgggattttatttggcaaaatctacaggcatatttgaatgataattggctatggatatatattttattattctttgaactcgtattttttacaaaaagcaaacgttggataaaattgggaatatatccatatattttgtttgcactaacagtgtgtaatccattggttgtaaaaattgcaggtaagatatttggattatcagatagatattatcgctttttttggcttattccaatagctccaatgattggtttttgttatgcggctatagtaaagaaagtgaataagtgttggatatgtgcggttatatggttgatgatattcggaagcattgttatgctgggcaaaccagtatattcaagttcatcacctccttatgtaaaaaaaatgaacgcttattatacatgggatgaagtcatagatattgacaaattattgcattcagaagggaaaaagaatcctaaagtcttatattcaggttggcttgtatatgatatgagacagtatgatccgactattaattctgtattggggcgagaagacttagagacatataacacattttttgaagagaatgatttacgagtattgttggaaaggaaagattatcattcgattttgaaatgggcacagttagcatattataaagaattagtaagtgcagaaatgtttagagaggcagcaagtgcagaaaaagtagattatgttattgtaaaatcagatgatttagatgcagtacaattttaccaaagttggggttgcagcgtattgggtgaagtggatggatattgcgtgttacgtacagagattgattaataattatggagacgaaagatgaaaaaagataatgaacagtataaacgtataatacgtatttttttagttgtagttttagtagcgtgtgaaacaagtttttttatgtatagttggataaaaagctataatttatatacggtatttccatttttccaaaaaggtcattgtatgatggcaggaatgtatgtaatgtatcaaatgatttttttatatatatttggtggcttgaaagttggctatctaaaaaaagctaatattatttattcacagattttagcattgatatgtgccaatattgttatgtatttacagattgtattgctttctgttcggtttgtaaatgtaggaccattactgaaaataacagtttacgatattggaattgtagtgattgtagcagtgatcagcgaaaaactttttcgaaaactttttccaccacgtaagttattagtagtgtatgaggaatatgatccaacagagtttatcaacaaattaaatacaagaaaagataagtataaagtagaacaaaagattaatgtaagtgctggtttggacatagttgaaaaagaaataaaaaaatatgaaggagttgttatatacgatgtacactctgagactcgtaacaaaattcttaagttttgttatgggaatgatattagggcgtattcaacaacaaaagtatcggatattctgatacgtggggcagaaagtttacatatttttgatactccgttattgttatatagaaaccatgggttaagcttcgagcaaagatttctaaagagaactatggatattttggtatcagcattaatgttgttgattacttctcctattttcttagttgcctctatcgcaataaaactatatgatgggggtccagtattttatcgtcaggcgagatgtaccatgaatggaaaagtgttttatatttttaagtttcgaagtatgatagtagatgcagaaaaagatggaaagtctcaaccagcagcagatcatgatccaagaataacgccagtaggaagaatattgcgcgcaacacggttagatgaacttccacaattaatagatatactgattggaaacatgagtctggtaggacctcgtccagagcgggtggagcatgtagaaaagtatacggaagatcttgcggaatttgaatatcgtctaaaagtacgtgggggactgacgggatatgctcagatttatggaaaatataatacaagtccatacgataagttgcagcttgatttgatatatattcagaattattctattttcttagatattaaactgattttaatgactataaaaattatgtttatgaaagaaagcacagaaggttttactgaagagcaacggaaggatattcaggaaaaagaatgaaaaaaattacatttttaatgttacatctgggatatggtggagcggagcaggctgttatagcacaagctaatttattggtagaaaaatacaatgtagagataataagtttttataagttgtatgaaaatcctgcatttgaagtggatcctcggattgaaataaaatatcttacagagaatgttaaaccaaacagagaagaaataaaaaaagctattagtgcacgtgaagttggaaaaatagtgaaagaagggataaaaagcctaaaaatactttattggagaaaatataaaatgcggactgcaatacgagaatgcgattcggatgttattatatcttcaagatatatatatcacaaattattaactaagaatgcaccggaaaaagcagtttgtattgcacaggaacataatcatcataatggaaatgaaaaatatataagaagacagatacaggcaataaaggatatggattattttatgccggtatccagagaactgacggagttttacagggaaagaactaggggaatgaaagttaaatgcaaatacatttcccattatctggagaaaattcctcaagaaaattctgatttaacaggaaaaaaaataatatcagtaggtaggttagctccagaaaaaaattttgttgagttgattgatatttttgcactgatatctaaaaataataaagactggcagctacacatcgtaggagacggcgcggaaaaagaacgattaattaaaattataaaagaaaatgggttgaatgaaaaagtaattttacatggatatcaaaataaagagtatattgcaaaattaatgtatcaatcttcgatttatgttatgacttcactgacagaatcttttggactagtgttaatagaagcgcagtcatttggtattccatgcattgcttatgactgtgcacagggagcaaaagagataattcaatcttacaaaaacggaatattaattgaaaaacattcacaaagtcaaatggtgaaagaattggaaaaactgatatcaaattataactacagaaaaaagatcggagaagaaggaaaaaagaatccattgaaatactcaaaagagagtgttgcaactttatggtatgattttattgatagtataactaaaaaagtgtaaaaggaatatatatgaacaaattagaaaagttagaaaatataacaataacatatagtaagtgtcttgtattatttttgatgtgttttataccatttagaaatgagttagagcttctcttaggaacatatataaaagttttgccagatatgatgattttgattttgcttatgggttatgtgatatcccaaaggggtagggttaaaatccaactaagtgatatcattttttgtttgttttttttggtggctttaataaatactatttttataaaaaaaataagtataagtatatatataatggaagtgagaagtttagccgtttattatattttatacgttgttattagaaactataaatttgaacagaattatattttgaaaatatgtaaatgtataagaggattgacctatttgctctttgtgcttggaatgattgaaatgcttagcagtaaaatgctgctttttcctaagagcgttgcggaatcaattatttacgcggataatttttcaagaatgtatggaatgttttgcaatcctaatacttatggtgcatttctggtactgacatttttctttgtaatatatcatgcaaaaggagaaaaactatgggtctataaatgcatagcgttggcatcattatttatgactatgtcaagaagttctctccttatctttatatttgtcgggattttgtacattttaatttttagaaaggagcttctggagaataaaaaagctcttattttacaaataattatagttggcttaataagcattggcatttatatgctgagtgttgtaggacgggaatctatggtgaaatatattaatgcaggaactacagctgaagaagccgagacgacaatgtttgaccgacttaaggaaatgaattcagaagagattgttgaacaatctaatttagtaggaagaatttttattgtgaaaacgggtatccaaatatggaaagacaatgcaatattgggtacaggttttggaacatatggatctggcgcaagtatggcatggataccagagatttatgaacaatatggtataccagctggatgttattcagataacgaatatataaaggatattgtagaaactggtagtgttggttttctacttctatgtttatttttggtaagtattttatatgaacaaaggaaaaaacctttaaacatattaatttgtataatggtaggatggtttggattgttttataatgtatttgaagttcaaatagtagcttttttgctatggggatatcttggagtcttaaatcaaaataagaaatatgagaggtgatatgagttgataccgaaaaaaattcattatgtatgggttgggggaaatgagaaaaacaacacaataaagcaatgtatgaagacttggggaaagcatttggaaggatatgaagttattgaatggaatgaaaataattttgatatagattcacacccatttgtgaaagcagcatataaagctaaaaagtgggcatatgtgagtgattacataagggcgtatgtaatatacaaatatggtggaatctatttggatacagacatactagtattagataattttgatcgctttttaaataatcgcgcatttgttggttttgaaaatccacaatatccatttactgcagtctttggtgcagaacccggtcatccattagtaaaggatatgatagaatactatgaccgtttagatgaatataagtttgatttcgaaaaaaataatacgatatcagtatcagatttactaataaaaaaatatcattgcaaagtaggaaataaatttcagattttagatgaagatattgctgtttatccggatactgtgttatgtaatccgtctgaaaattcgatatctattcatgtgtttacgggaacgtggttggaagggaaaaaagctttggcacgaaaaattaatgtgtttttaaaaatccatgttacgaataagaaaagagcaaagctattccgaaaatatattatgcgggtataaggagaagtatgaaagcattttttgagagactttatgataaatcggataatcaattttatagagaaatgaagagaaatctgcaggaagaaacaaaaatgttcatcattacggcaaatccagaggcatttatgtatggtgaaaaagataaacaaatgaaagaattattattggattcatcagatacgattgtagctgacggagtggggattattaaagccgcaaaaatgttgaaatatccaatgccagcgaaaattccaggtgtggatattgcaaaaaagttatttgaatatggaaacgaacttggaaaaacaattttcctttttggggcgaagccggaaatagtagaacagctaaatcaggttttgagagatgaatacaaagatttaaaggtggttggaactgaaaatggttatgtacagaataaggatgcagtatttgaaaaaatgaaacaacttcagccagatatagtattagttgcattaggtatgccacaacaggaaaaactaatatataagcatctaaaagattttgaaaagggtatttttgttggggttggaggatcgtttgatgttttgagtggaatgaaacaaagagcacctcacttttttgttaaacataatattgaatggttgtatagaataacaaaagaaccatatcggttaaaacgtttttataatagcaatataaaatttatatttcgagtaatgtttgataaaaatttacgctaaagaaagggaaaaatatgagaaaaataaaagtaatgagtattttcggaactagaccagaaacaataaaaatggcaccggtagttcatgaattggaaaaaagagaagagattgaaagtatcgtatgcgtaactgcacagcacagggaaatgttagatcaggttctgaaagcattaaaagtaaaaccagattatgatttgaatattatgaaacaaggtcaaacattatcggatattacgacaagggctttaaaaggtttggaagatgttattaaagaagtaaaaccggatattattctggtacatggagataccacgacaacgtttgcgggagcattggcagccttttatcagcaagttgcagttggacatgtagaagcaggattgcgtacatataataagtattcaccgtttccagaagaaatgaatcgtcaattcgttggaatagtttccgatatgaattttgcaccaacagaacgaagcaagaacaatttactgcgagaagggaaaaaagaagagacgatttatgtaaccggaaatactgcaatagatgcattaaatttaacggtagatgaagaatatagtgatgaaataacagaatggataggagacgaccggcttattgttctgactgcacatagaagagaaaatcttggagagcctatgtacagaatgtttaaagctatacgccgtatcatagacaaatatgatgatgttaaaatggtatatcctgttcatttaaatccattagttgtgaaagcagcaaatgaggtattcggtgatagtgagaagataaaattgattaaacctctggaagttgtagagttccataatctgctcagcagatcatatcttattcttacagacagtggcggaattcaggaagaagcaccctcccttggaaaaccggttattgttttacgagatacaacggaacgtccagaggggatagatgctggaactttaaaacttgcagggacggaagaagagacaatttatcaaatggtagatgaattgttgagcgattcaatggaatatgaaaaaatgagcaaggcatctaatccatatggagatggtcatgcaagtgaacgaattgtagatgcaattattgccaagtttagcaagagtattggagaagagtaaatgcgaaaaaaatgcgttatgctaagtaactatgttgtgaaagatagagatgcaggtgcaaaagctccgaaagatgttaacgcagtatttgaacaaaattttggaaaaatatacatgctatatcatattaatcgtagatatattagaaatattttgtcgtggttaaatatgcataggctgaaaaatgcttttcgagatgaatatatgtttgtacaatggccattatatttgtggagtccagttactgtagaagatatattaacaataaaaagcaaaaaaaaggtagtattgattcatgatatagatagctttcggaaatatccagattcaacagaaaagcgtaaagaagaaattcagcgcttaaataaatttgatgtggttattgcacacaatagaaaaatgataacatggttgaaagaaaatgggttgaaaaagccgtgtgtttctctagaattatttgactatcttgcagaaacaaaaccttctcaaaagaaaaatacaggagaagataataattatacaatatgttttgccggcaatttaataaaatctcgtttcatgcaatcaatatcacaatacattcattcgccaattaatatatatggtaacaaaccggactatatattgaatggggaaaatttgtgctatcagggaagttattcccctacagcgttgtgtgaagcgatgaatggagattttggtttaatatgggatggtgggagttgtgaagaatgctctgggaatgatgggcaatatatgaaaatcaataatccgcataagttgtcattgtatatatcttgtggtttaccaattataacatggaaagaagcggctattgcagaatttatagaaaaaaatggaataggatttgcagtgaatagtttggcagaaatagatgatgtattaggtaacatgacaagaaaggaatatgagaagtatagaaataatgtgttggaaatcacgcgtgatgtaagaaaaggagaatatgtaaaaaaagcatttatagaagcgatttccattttagaggaggagcgcgatttagaagaagtaatgcaaagagattagaggaaatagatatgcaaaacaccagaaaatcattaaaaatcaattttataatgaatgtaatactttcgatgtcggcatttttatttccattaattacatttccatatgtgtctaggattttaaaaccagaaggaatgggaaaaatttcttttgcgacatctttaattacatattttgatatgattgcgcaattgggagttccaacatatggaattcgtgcatgcgctaaagtaagggatgataaagaaaaattaactagaacggtacatgaattattttttattaatatatgtatgtgtgtgcttgcgtatataacactaggtggagcacttgtgttggttccaagattacaagaggatcgcacattatatataatcgtaagtgccactattttatttaatgctatcggcatggaatggctgtacaaaggattggaacaatatacatatattacagttcgatctattctgttcaaatttattgctgttattttaatgtttatattggttcggcaaaaatcagattatgtggtatatggaggaattactatatttgctgcatcggcgtcaaatatacttaattttataaatctacgcaaatatattggtgtaaaattaattggaaattatcatcccaaaaagcatttaaagtcagtagtgattttttttgcaatggcctgtgcatctactatatacacaaatctagatacggttatgcttggatttatgaaaactaatcaagatgtcgggtattataatgcttctgttagaataaagactattttggttagtttaatcacatctttaggcgcagtattgctaccacgagcgtcatattatgttgaaaataaactgtgggatgaatttaaaaatatcagtgaaaaagcattgaattttgtttttttactttcggttcctttgatggtatattttggaatgtttgcgaaacaagcgatatttttcctgtcgggaaaagattatgctaatgcgattttaccaatgcaaatacttatgcctacgcttttaatgatagggattactaatatattgggaattcaaatgttagttccacttggaaaagaaaaggtggtattatattcggaaatagcaggagcaattatcgatctattactgaatgccgttctgattccacgttttgcttcgtcaggagctgccatcgggactttgcttgctgaagcaatggtttttgtggtacagtttatttttctgaaagaaatggttataaaagccttaaagaaaataagttaccaaaagattatggtagcagtgattttagcaattactgtttcaggctgggtgaacttgatgagctggggaagttttgtttgtttagtggtaagtgcagtactcttttggggagtgtatggaggagtattactcattacaagagagaaatttgtgaatgaaatagtaggacagatgattaagaaaataaaaagaaactgagacatttttctggaaagaagaatgtaaatggtattttgtctgtcagtatttaaaattgctttacaatataaataagaagacaagtgcttgcgtctaacgatggcgcaagcatttgtttttacagataaacaaggtgtataaaatagcgaaaggaattatgatgattataaaaaagggtattaaagggtatatggtaaataactcgtcctcccgaaaaagatatgccagcccgaaggctggcactgagctttaccttgatttagtttttcgacagtgatccggcagttcttcagaccatggcattaaagtttttaacacctctgttggaacatcgtttcgtggatacttcacaagttctgtcaacaggtagcagaagtactcgtatggtttcaggctgtttgccttggcactttctgcaatactgtataagagagcactcgctttggctccttttgtagaatcaatgatatgccaggaatgttttccaacgcagaaagacttgatactacgctctgcatcgttgttatccagcggaagaagcggatcttccaggaatcttcgaaggtatatttcctgattgatcgaataattgattgcttcttttaacttggagcttgcgtttgattttccctgtaatgttttcagccacgcaaaataggcatcgacaagaggctttacagagcgctgtctgttatctaatctctcttttgccgatgattctttatacatgttgtccaaatgatacatcgcgtcaatccgtttgactgcttcagcagcaactgcctgtcctggcgtgagcggcgtattcttcttcacaacttttatgatctctgtgaatttacgtcttgcatgagcataacatccggccacctggatcctatcactttttttcataagcgtatgatacggctggtaaccatcggttacgagtgtcccttgatatccggatagatatttttccaggacttcgccgcttctgccacccagatattcatataggaagagtggatgggtatcgcttccaccaggagaatggaacacccacatatattccttgctgtgctgaggcatgataaatggtgtttcatcacaatggatatggtgggattccataatctctgctttcatcagatcatgaaccggctgcagataatactcactgagacggatcatccatcctgccatatcctgccgcggaatgttgacatcatttcgaaggaattcttcagaaagacggttcaaaggtaccgcatttacatactttgcattaaacacggcagctgccagttccggggtaagaatactatgtgccagcagacgttccggtgcttttgcacgcagaaaactgccgcaatcagaattcccggcatatactttgatatgatgttccaatactttaaatctggctggaatatactgaagttctttatatacttcatcttccataggatgccatccttttggaaagtgttcccgtaattcttcttcggaacaatcgtggttgatcacttcaacttcgatgtcctgaagattcaggtcacgttttcctttggttctctttctgcggacaacggctttttcaatgtcaggttcatcaggaataccgttttctacaagtgcctctgcttcattcaggacacacatgttttcaagagaaaacgacagttgtcccataacctgtttgtcagtttccgttctttttccaaaacgctgttgtgtcaggatcgcaatctgttcctgaagatcttcaatctgatggatcagcctttcattctgatcctggatcttctggctctgtgcagataaaatcgtaaagctttcgctcatctgtatgtacagcaatgctatggcattcttcggcatcttattcagttcgtccagggttaaagtaatgttttccatgaatccattataccacagatggcactgaaaaaccctttatttcaggcatttcagggaaatttagataacttataaaactgtcaatgtacatatataaaacagaactaataaagctctggtttcaccttgtgtattacttttttctgttcaatggaaagtccttccatcagccatcggtactgttgaggggtaaggtctctggcttctttttcacttcttggccattgaagttttccatcggtaaatcttttatagcatagaagccagccatcgccttcgtagagtaagactttcatccggtcatttctgcgtccacagaacagaaagatggatcccgcttcggttggatccaggccaaatgttccagtaacaatagagatcaatccatcaattccttttcggagatccgtatatccggtacataagtaaacgtgttggaagccggaagcatcattgagcatgacgtatgatttccagcattctggatattagttctgatgacgagttttcgttcacacagaactcaatctcatttattttaataatcatctgagtttcaaatgcagaggttcctttttcaattgttttggctggtatctgttctgatgtcagagcaggaagttctacaaaaccagcctgtgttaaagctgcttcttttactttacgcagccaataataataggcatctctggataacccgtgctgttcacaataaatatcaactttctggccactggctttgcagtcttttataattgcagcccattcgttcaatcggatttgtctggtggctaacttggtgttcatgatcaatacctcctgtggtgtttttcgtaaaaagtgtgaaacacactttttacactctacacaccattatcccagattttggagatgtcaggaagttgacgggttattcaccatttacattaaaggaaaaaataaaggcggaatattaagtatattgagtatttgtatgagtgtacttgtgttatcgctagggagtttgtattttgcgacagataaatttggaattgaaatgttttattcatattttaggaatccatatacaatattgctaaatacgattccaattcttttactgatagtatttctttttttggtatgcaatcggttatggattagcataggaattacatcaattgtcgtgattgttttgacgctaattaattattttaagatattatttcgtgatgatccattgatggtggaagatctttcgttgtttttggaaatgaagaatatgacggggcgttataagatacatgcgaatagtacgatggccttttggattttaagtatggtaattcttgtcggaattgtatggaaaattagaaaagtagtagaaataagaatgaaacttaggacaagaataatttttttgataataacagcattaagtgggattttctgcatgcatagtcttgttttgaatgataaatattatcaaaaaacagagaatatagcgctgatcaatcaatggagagctacacaacaatttgttagcagaggttttgtttatccgtttttgtatagtagcaaagaagctaaaatggaaaaaccgagtggatacagcaaaaaagaaatagaaaatagtttaaaagatattaaagaggatgatataccagcagataaaaaaattaatattattgctattatgatggaagcgtatggagatttttcaatatatccacaattggaatttaactcggaaaatgatccatatgctgcattcaatcgcgttaaagaaatttcttatcatggaaatttattaacagatatctttgcagctggaacggtcagaaccgaaagaagatttataacaggagcagatacttatccggatcttcgcaagaatacatactcttatgccagatattttacagaacagggatatcgggtagaaggaagtcatccgtgttatgaatggttttataatagagtcaatacaaatgatcatttagggtttagcaaatacgatttttatgaatcgagatacagtgctttggcaaatggcgaaatagcgggagatgatattttattcccagaattgtataaagatttagaaagtgcaattgatgacggagtaccttattttaacttaagtgtcacctatcagaaccatggtccttatacaacaaataaattatttgatgttccatatattttagaacaagataattatacggaatatgaatacaatatttttaataattatcttagcggcattaaaaagacaggggaagagttggaaaaacttattaagaaagtgaataatttggatgaaccgtgtgttgtggttgcttttggagatcataaaccatggcttggtgaagaaaatagtgtgtatgagatgctgggaattgatttagatgtgagtgatttggagggattctatgattattatgcaacaccttatataatgtatgcaaatgatgcagcgaaagaactgacaggtaatcaatttataggagaagggagcgatattgctccgaattacttgatgaacgaattgtttgaacaaataggatatgatggacctgcatttatgaaaattactaattcagtaagaaaagcgataacagcacacagtgatggcctttttgtggaaaatggggaggttgtggatgaattatcagacgaagatcaaaaaatgtgggatcagtataagaaatatgagtattactttatgaatcagaaaataaaggaatgataattatagtatgaaatgacaagaaaataatatgcggatggtaggaaacgatatataattataaaaaacagatgccggaagaaaatattaggtgattaaagaaagaaaagatgcaaaaacaacaatagtatcaggaatattattaactggattgtttgcgggaatgctggttgcctataaatccgagctagaaacaacatcatgggatgctaaaagtcaatcagacaaaaatacaacaaattcaacagaagaaaaaacagcactttccttggaaaagaaggaaatagatatttcaggattgaaaaagcaatataaattaattgttttatcaattgtattaatcttattcagctatgcaaagcaggttgaaaaaaaatgttttgagaaagatcgtttcagttggaataaataaatcaaagattattaataggaaatatggaaaggaaccgtatgaggaaaaataaaataatagccatggctctaggcagtgtattaggaataagtatatgtgcttgcaattcgtcaaagaatagtatttcgaccaatacagaggaacaaccatcagcagaaatcacaccgacggaatctatatcttgggataataaggaaataaatatccaggatttaaagaaggaatacaaattaatcgtagtaaacgatcaacatattatagttcccgatggcgactatatatcagaaaaaagtgaagaaatcgagcaacgtgttacaatgttttcaaattctgacggaaaaacttcgcaggaaacgtggccggaaatggtagatgcaatcaatgcggaaaatccagacggtgtaatcttgaatggtgatatgatcgatttcttctcagaagctaatttgaactgcctgatgacagatttaaaacggattaaagctccggttatgtacaatcgtgcagatcatgatttgggaatctggtatagtgatacatatacggacgaggatgtgcagcagaaagagaaagaatcctgggatatggaagaggtaatggttcaggattttgatgagttcctggttgtgggaattaataataataccagccaattatcagaagcgggattggaaaaattaaaagaattatgggtggaagataaaccaattattttaacaatgcatgttccgctgaaatcgcaagtaaatgatggtcttagcgatgcttcaaaggctgtatggcaggaccgggcacttttgtggggaacagattgcttctatagcccggacgaagtgacacaacaatttttggacatggtatttgcagaagacagcccggtggtcgctgtgataggagcgcatctgcattttgcgtatgatgaccaactgacggagaagataccacagtatgtgtttgatgcttcgtttaaggggacggttggggtgattacggtgaagtgagataggtactggttgaaaataatagtgagaatattcaagtgattaacttgatgttgttgtatattagattccacaatgcatagttagaggatctattaacgcatccgaaaaaagaaacggatttatcatactataattagaaaaagtaatcaataaaagtccatatgatgaattaaggaggaaatgctgatgggaagatttgatgatctaatgttatcgggagatattgttcgtggaatgttaagcgtgtgcgttagactgttcgtaatatcgtttgtcttaatgattgcattttcggtagtattaaagagaatgaatgcaaaatacagaataccggtaatgtggtattttagcctcccgaaattttttatatctgtgtttgcaatattattggtcttttgttttgattatgaagaaaagtatttgatgatgtttcatatttatgatatgacagcagctactttttttgttggagtgctggctattatggagtgtatatataccttgctatctatgggaaaggaatttgtggaatgtaataaaagtaaattcaatttgtagaaaatcatatgccaagtaggcaggcatcagatgtaatgaaaataaagtggaattttatgagagaaaaattttcatatgataaatatttggattttattgaaaaagatgaattggaggcaaataaatataaaaaccaatttattcccgatcggctttacaagtatcaacctataggatctgggcaaatgagggcgaaaagaattcaaacaattaagaaagaacaaatttgggcgtctagggtgaaatatttaaacgatccgtttgaatttaagatgttatatgcggatcaaaaaaataataatgtacgagaattttacgaagatgtattgaatcgaaatgaaattatttgtttgagtagtaaatggaatgacaagttgatgtgggctcactatgcggaatcacatacgggaatgtgtatagagtacgcatttttgcatggcgggaagggacaagtgactcctgttacatatgtagcaaataggcagtgttttgatgatgaattaaaagtctggttgaagaataaaaatttagcattagaacaaatgttgaaacaaaatgaaataaatggtgtgcaaagaagacagctacattcatgtggaaaaattatgtatactaaagatagtgtatggaaatacgaaaaagaatatcgaatagtgaccagaaatcatgaggatattaagaagggtatgtttgattcgtataaagatgaaaagggaagtttgcacaaaacacaagagtttgaccttagcttatctaaggtatatttaggaatgaattgcacagaagaaaatagaaataaaattatagaaacaattaagacgattaatgataatagcgtaagaaaagctgttggtcatagtagaaaagataaaaccaaaatgtataaagtattgaagaatatggggatgattgctactgtgtggcagatatattcagatgagaaactaaggttaaaatgtaaacaaatatattaataggatttgctggaagatatttccattgaactagagatagtgatatgctagtatcagaataaagaattcctttagaagaaatggggctgtcgctttaacgaatgaattttcgtgaagcggcagcttcctttttgctgttctaaggataaaatccatcaaaaaacgcttttcattgttacaggctattattaaagacgcactttaataagccattcttgatggcttgaaaaattgttttgataagtcaaaatttaggcactttttatcggaaataaatgtgttccggttcttccattttgaatcttattatgcagtttgtttatgtttcttgccatggcaagcaacgtactttctgcaagaacatttgcatttcctttgctcaaatatctgcggaactgcatatcctgttttaaatcgccaaaggagccttccgcctgtatgcttcggtttgtcctgaagaggatcccttcttctgagagtatccggtctaaatcttcttttctatgttttagaaatgttttcgcaacctgaagtgtctttgtccgttcttccaagggtgttttgcagttattccctttgatgcattcgcttttgtaagggcatccattacagtcctcacatttataaatcgttttttcacttacatatcctgttttgctttttgagtggcggatatgatctacacctaattttttaccatttttgcaggtatagatatctttttttacatcatactccatattttctatcttaccgatatcagttttatatttacgggtcttggaaatctcatagttcgcaggttttatataagaaagctgaccatttgcttctagaaacagatagttttcttcactttcatatccggcatctgctgttatgtttttatatttgaatttcaaatgctcctgtgcatctttcaaaaatggtatcagcgttgtggtatcagtaggctggggacctatggtaagccatgtgatgtattcagaatccacgccatgctgaagattataagcaggctttaactgtccgtttcccatggcatcctccttcattcgcataaaagtagcatcatgatctgtctttgaataactgttgcgttccgcacagatatgtatctgctggttatattttttgagccggttcaaataactttcaagagtttcaatactcttttgcagtgaagtttttcttttcccgatcccatgcacaaacactatattttcagtttcttttaatgcatacagttttttgcggagcttctttacatgccttatttttatcgtatttccataaacgatttttatatcataaagcaactcacactcagccacaaaatcagcaagtttctgcaaaagttttgcctggttttttgttactgccttcttccagacgaaagtatacttattggcactggcttcaatttttgtaccatcaataaaaatggtctctccggaaatttctcccatatcaaacaatgcattagacatttctgcaaggatacgtttagaacagggagcaaaatggatacttctaaaccttgcaaatgttgcatgatcaggagccggggaaccttctagaagaaacataaaattgatatctcttttacaatttagttccatggaacgagaggagtaatccccgttcatgtaagaatagagcacgatcttcaaaagtgttctgggcgatacagaatttattctttcataagtagaatataggtcagtcaaatccatagcctccacaaactgacttagtaatcgaacagaatcattatccggaatgattgtttcaagatttaacggaagtttaagttgatatccgtctgaattttttgtataatctttttgtaataatttagttagtagcataacttgattttacaccaactgccggattctttcgaggtctggcagttatttttttgcacaagaaaaggagctgcgcactaattagtgcgacagccccatcttttgagggggagatgtgatatagatgtttggtaaatgtctaataaatatagagaaggagagttgagtaaacttactcgacgagtattttatatggatttagaattattaaagaaagttgtaaagagggtgagtcctttaactacaacagctactaagattaagattgagggttatacagacgatgaagtgaatcaaatgattcaaaaacttattgatgcggggattgttacaaaacaaaaaggaaaaaaatatggacttggtatgttaggatttgatacagatggagaagaaatagaatactataatgtatttgaaactaaattaaaagaactgtatcatattgatcgaatgggaaacaaaataatgtattagtcaatgcggtgagaacaatttttttggaacgcagaagatgtcaggtgcaataaacaaaatggaataactattaaagttagtcaggatggaacaataaaaatatattctggtgaggataaacttttttattaagctatcattagaaattgaaagatttatagaatatatataaaaagggatgaggagttatatgtcgattctagtaaatgtaacagttccagatggcatagtaatggcgtgtgatagtcgcgtgacgcattatgtagggggagtgaaaaagagttacgaagataatgcgtgcaaatattattatctacaatcatggaaagttgtaattacatattgtggcaatgcatcgattggggaaagaagtatagcaagttttttaaatgatttagaaatagaagatttaaataaaacagataccgttatagatatttctaataaactattagcaaaaattcaaaaagaaaatgtaacgaaaacaatattttatataggtggctatattggaacagaacaatatttatacaaaattgaagagttgaatttaagaagacgcaattttggaggaccaggacatacacttttttatcgttatgattgtgatggtcaatcacagtatatgaataccaatttaaaaaacgggaaaaattcacctgatttttcgaaaatgtcattaaaagaagcaaagggatttgcttataatatgatagtatacacatatatggaagaacaacgacaaaatgaaaactattgtggtggtgatgtggaaatatttagtatacaaagagatgaaattgcgcatactaaagaatcagtaacgtggatgtcaaaccaaagttaagtaagcgcttaaatcttgggtagctttactgcctacgtttttgaactcataataatagtaaatatatttttattacacttcgcttgggaggagatagaaatttactacatttggaggttgcattatgagtaataaacgtgctccagggcgttctctggaagaatatgtgcggcaggtattggaagaaaaagaaaaccatgtaaatgcctgaattctaacccatccgcatccagatcatataggtgcgttcaatcaaatctggtagcagctgggggatattcaggttgatgaggtgtatacgattgatatgaattatgacaattataaggcactggcacaggaatgggataattttgaaacattcgatctgtttacacagatcacgcagaatgatgacagacttcattatgtaacaagaaggtgtcaggcacaataaaaattctataaaaatatttgaaacagttgccatttcaaagtgtcttgtgtatacttctttataagagataaaatctgcagtaaaagctggtgagtatccaccattaagagggaaccgaaaaaagcaggggggtgagtgatcgccccctatatttgtagtaaagtaaatcataatagaattgattaaaaattgtggatatgacaatgatataaataaaaggggtgaactgtgtgaaaatccagtggatcgaatttaaaaatttaaaaacaaacctggaaatcgaaagaatttattttaatgaagatgtaacccttctggttggcctgtcaggagtaggtaagacgcaaattcttaatgtggtagagtattcactaaaattagcttttgataaagatatcgggttacgcccttatcgtgttggaatgggaattttgattggcgatgaagagtatgaatggttttatgaaattaacagggtcaatgaggacgaactggtaattggagaagaaagtaaatatgagtttttgtatgaaaaattaacgagaaacagtcaaatactgtttgagagaagagacaccaatgtggcagtgatcggatatgataaagtgccacagccaaaaaaggacgaaagtttaattttacagtattcggaagatgaaagttttgaaaaattaatttcggaaataagaaagctgtattcagtagagatggaattggcagttcgtcagggaatccggagtgaaagtttcagccgtttaaaggcaaaggttattgaagtattaaatgccagtaatcagcagatagaatttagagttttcagtcatctcccggtggcaataaaactttatattgtgaaaagatattatgaagaaatttatgttcagatatttgatgcagtaaaagaattgttcatggaaatcgaggatattgatgtcgaggaagattcggatagagagatgtatctggtatcgataaaagtatatggaaagaaattatttcagcaggatatttctaatggtatgttaaaaaccatttattatattgttgaattatttaccatgccagagaattcgcttgtgttgattgatgaatttgagaatggtctgggagtgaattgcattgatgttctttctgaattgatgttatttgaacgtaaggatcttcaatttattattaccagtcatcatcctaaaattatcaatgcgattagtaaagacaggtggaagattattgacagagaaaggacagtagtgaaaaacagcagcagtgccagctatggaatcggaaacagccagcatgatgcatattttaatttgatcaatcggtgggaatttgaggggaagatataatgaatttttactttttgttggaagatgaaaagtcttttttgaaagtattaccaaattggcttgaatatatgggggttgattataaacgagttgctgatatacaggaagtggaagaaaacaactatatattgcaaagcggtcagggtgttactcaattagttacaaaagttctctttgatactatagatactattttgctgaatcctgggaaaattgataatctgattgtgattttggatgccgaggaactgaaagttgaggaaagaaaatcggagataatcaggaaaatcaatgaacactatccgaatcgagagtttgattttgaaatagttattttggtatgtaatcattgttttgagacgtggttgttaggatgtaagggactgtatccagagggagagattgaaaaagaatcggatttttatcctttttacattcactataatatagaaatgaatgatccggaaagaatgagtgtaccagaagggaaaacggagacaatagcgaaatatcattttcactatttgcacgaattgttgagatataaaaaaatccgatattccaaaagcagaccagggaatatagctacaaaagattattttaatggaattgttgacagggtaaaaacaacagaacatttaaatacgtttaaggagttttatgatttttttctgcaatagtgactctggatcgtgtagtagtgacgttgtatggtgaaaagtaaagccttatattgtttaattctgacccacctggattcaggatccacctgtttttcaagtgggtcatttctgtatgcaaatctgattttttacactgtgaattaacccgcccagtgtatcaattgaatggaagttaagattatcgtcattgacatttcaatagttttaccctataatcgttctaaaaagaacaataaaggagggaacccatgtatttctgggataagcataaaacaattactacctattatgaattgctttccggcgaggtatgtgaccgttatggattgacacagatggaatatgacatcctcatgttcctgcataataatccgcagtacaataccgcggcagaaatcgtaaagatccgcaaatcaaccaaatcccacgtttccacttcgctgaaaaacctggaaagtaaagggctggtggagcgtatccaaagcaaagacaataaaaaacatattgaaatcgcgctgttggatcaggctgagataattatagaagcaggcctgaacgcacaaaaacagtttgcacaaaatgtgttaagaggtctgaccgaagaagaaatccgtctgtgcatccgggtatttgacaaaatctgcaataatgcagaagagcagttaaaaaactataaggagaatgaatcatgaaacagaacaactacaaaccacagattccggatgtgatggaagcaatttttgacgcggcatatctgatttttgatctgactgcagccctcttgtttttcttcttctcacaggggaatcccttatttatcctttacggaatcctgactctgactctttgcggaggcgatgcgtttcatctggtaccacgaatcctgagagttgtacgcggaagcaatgacaaaataaaaagacagctgggaatcggactgcaggtctcatcgattaccatgactgtcttttatattatcttaatgtacatatggaaacttaccttcccggaacttgccgcaccgggaagcattgaagctgtcgtttggatatctgccattgtccggatcgtgatctgcctgttccctcagaacaactggtgttccgaggaggggaatctgaagttatctgtcatccgaaacgctgtctttgcagtgaccggtatcgggatcatcatcctgtatgctatgtccggaaacacctatggctaccatatgacaagaatggttgcggccatcatcatttcctttggctgctatcttccggtaactttattcagtaaaacaaaaccaaaggtaggattactgatgattccgaaaacgtgtgcatacatgtggataatcgccatggggcttcagcttttattttagagcgtgtttgaaaaaggcttttcgcgagctgcgagtcccagtttgtgggagattttatccgaatgagggcggcgtagcgggctacggcaaccgaatgagggtaaaatataccgcaaagtggggcttgcagattgcggaaatgatttttcagacacgctctagtctctgaaaggcgcagtatctgctgtgggaggattccgtattattttgcgctgtcagcatcaatcacagactggatctgcttcatcagtgtatcataattgtcctgattgtcgattccgccgagcatcggttctcccacaatatttccatttcgatcaaccaagattgtggtaggaaatgccatgatatcggaggcatattttcctgctgcggaatcagagtcgatggacagattgcggtacttcgcaccctgactttcgagaattgatgccgcttcttttatcgcatctttatttgcatcaaaggtttctgtgttgatgcctacaacctcgcctcccatggatttgattgcatcgtttaattcgttcagcttagacagctctgcgacacagggtttgcagccggtaaaccagaagttaacgacggtcacagcattgttggaaaacagactttcgtcaactgtgttgccgtcataatcctgaccggagaaatcccggaatggagatgcgtcttcggagttattttcggcatcggtatcctcagatgttgttgtgtcgttttccagctctgcgatctgttcctcgatttttcgtatcgtttcaatatcatctgtcagtgttttcagctcatcctctgaaaaagagtctttgttggagtcaacgatgtctgccagataatctgcataatttccacttggatcagccgtgcttttattcatcatgccaaatactttgttccatacctcctcatggtctgcaaaaatctggttttcctgctgatataaatcatccagcttcgtgccggaagttcctgtagtttctgtaccggattttgtaccggattctgttccagcttctgttccggcttccgtctgggttgtctgtgtttttgttgtgtctgcagcttcttttccgctgcatgcggtaagtaataatgctacgctgagtgtaaaaacaggaataaatatttttttgtttttcataaatcatgtctccttaataaatagtataaacttgctaatcactggttgctgctgtcctttttctgacagggttttcccatgaactggtagtgaatcgcatctttcgggcaggctctgatgcaggctccgcaccggatacattccggatgattcggtgtccggcacacatcaatatccattttacatgcccgggtacactggttacatccgacacatttgctgtcttcgatctttatattcaaaagactgactctgttaaataaggaatagatcgcgccaagaggacagatccatttgcagaagggtctgtaaaacataatgctgagtacgatgaccgcaatcagaatacagaatttgaatgaaaacagttttcctagtgcagaccgtattgcggcatttccgatggaaagtggtatcgccccctcaagaacaccctgcggacaaatatacttgcagaagaagggatctcccattccgatcgagtttgttgcaagcatcggcagaaggatcacgaaaacaacaaggatgatgtatttcagataccgtagcggcttcagcctggctgtggaaaatttctttccgggaattttgtgaagcagatcctgaaaccatccaaagggacacaaaaagccacagataaatcttcccagtgtcactccgagtagaatcagaaacccggttatgtagtaggaaaacttgaatctggatgatccgacaaccgcctgaaaggctccgatgggacacgctcccgtggcagcaggacaggaataacagtttaacccggggacgcataccgttttcgccttgccctgatatattttgccctgaaagaaattgggaatatgaatattggtaagcagtgtggccgctgcctgtatccatccacgtattccggctattttctttgatcgtaagttctttttcttatccaattccgacacactccagacataatttaattgcttttccaagcactgcagccgcttcccctctgaccgcaccgtagctcatcatcgctatgcctgtgatgaccagaacaatttgagatatttgtttgcacttcaaaatatggttgctccttttatttgttgtattgattgaccagctgacttcgatattatacaatagctgttgtaaaataattgttaagaaatgggcgggtgaagaaattttgagattattaatcgttgaagatgagaaacaaatgtgtgacacggttgccagaagtctgtatgctgccgggtatgaggtggatacctgttacgatggggcggaggctctggaatgcatcctggcagagaattatgatctgatcgttctggatctcaatctgcccggcatggatgggatggatcttctgaaagaactccggaaggaaaatgaggagacgaaggttctgatcctgtctgcaagagggcagatcgcagataaagtggaaggacttgatgccggggcaaatgattatatggaaaagccgttccatctgcaggagctggaagcacggatccgcagtcttacaagaagaaaatttgtgcagaaggatgtctgcctggaaagcggcgggataagattcgataccatcaaacgagaggcctatgcaaaaggaaccctggtttccctcacaagaaaagaaaacggaatcttggaatatctgcttcttcaccttggaagaccggtaagtcaggaagagttgatcgagcatgtctgggatgcatctgtggacagcttcagcggatccatccgcgtacatatgtcttcgctcagacgtaagctcagggctgtacttggatatgatccgattctgaacaaagtgggtgaaggctatcaaataagagaggagtccgatcgatgaaaaaaatatcgttgcagtggagacttacctgtatcattaccctgtatattgcgttggtctgtggttgtctgacgctgcttgtctataaaaacgggatttattatatcgattccctgcaggagactgtggatgcccggggagatgatgtcggagagcgtgtcggggatggcgacacagatgattcggatcagatatatatcagcattccggaggataagtgggatgagtttgcaaaggatttctctgttcaggtgtacaacaataaagctgactacaaaaaaaacagtttgatcctttctgctttactggcgcttcttggcggtgtagctacttattttatcagtggtcatgcactcagacccattcgtgaattttctgaaaaaatcgaggaagtacaggcacaaaatctggcggattcgcgaattgaagaaaataaagtgaaagaactgaaccagcttcgtatttcgtataacaagatgctggaacgtcttgcgggtgcttttgagatacagagacaatttacggcaaatgcagcacatgagcttcgaacgcctttatctgttatgcaggtacagctcgatgtatataattccactccacatcccggcagtgatggtgacaccttacagacgataaagatggttacggaacaaaacggccggctcagcaaaatggtcaagacactgctcgatatgagtgaacttcaaacggtaggacgggatgaaaccattgccgttgctgatcttgtcgatgaggtattggtggatctggaaccgctcgcccaggaaaaggaaataaaactggttggaaactgtaaagatatcactatgatcggaagtgatattttgatttaccggatggtatacaatcttgttgagaatgcgatcaaatacaatcgtttcggtgggcaggttactgtaaccgcatatcggaagggaaaaaatatctgtctgtccgtagaagataccggaagcggaattccggatgaactgaaggaacgggtgtttgaaccattctttcgtgtagacaaatccagaagtcgggagcttggaggggtaggcctgggactggctctggttcgtgagatcgtgcgtgtacatgacggcagtatcaccgttcagtccggctcgtccggcggaacggtctttgatgtggttttcacgcagtaattaacgcccccactgtacaggtgggggcgttggctatacaggagttgtttactgcagatccagtgctttcatactcatctcttccagcagctgggattttactttatacagcttgtcggacagatccacatatactttctgtggatttacaagacggcgtgtctcaggccacagggtttcctgctcttttttgcagattgcctgcatctccataacagaaggagaagtgtagacacacagacctttctggaataccggaacgagaagttcacgcagggtgtaagtgccgcctttgatcttggtctttttccaggtttcaatcggatcaaagatgatcatatctttactttcatcaaaggtttcgttaaccatacaaatcagatcggcacggatcttgccggttgctttgtcatagatacggtaaatggttttatttcccgggtttgtgattttttctgtgttttcagaaagtttgatcttcggtacgaaatcttcatcgtccttatctttgatggctgccagtttgtagacaccgccgaatgccggacagtctttggaggtgatcaggttcgtgccgacaccccaggaattgattgtggcgccctgggctttcaggctgtcgatcaggtattcatccaggtcactggaagcggagatgatcgcatcgccgaatcctgcagcttccagcatctcgtaagctctctttgacagataagccaggtcaccgctgtcgatacggataccgtatccatggaagttcgggtctttttctttcatttctttgaagacgcggatggcgtttggcacaccggagtccagaacgtcataggtatctaccagaagcaggcaggcattcggatacagatttgcataggttttgaacgcggtatattcatccggaaagctcatgatccaactgtgtgcgtgtgtacctttgaccgggacatcgaacatctttccggtcagcacgttggaagttcccacgcagccgccgatcacagcagctcttgcaccgtagataccggcatccgggccctgggcacggcgaagaccgaattccatgataccgtcgccctttgcagcgtaaaccacgcgagaggctttggtggcgatcagactctgatggttgatgatatttaagattgcagtttccaccagctgtgcctccatgacaggagcaactacttttaagagcggttctctcgggaatacaacggttccttccgggatggcataaatatcaccggtaaagtgaaatcctctcagatattccagaaaatcatcatcgaacagattcagcccccgcagatattccacatcgtccggagaaaagtgcaggtcacggacatattcgatgacctgttccaggccggctgcgatggcataaccgccgtcacacgggttctgtctgtagaaagcatcaaatacaacaacctgatcggtagggtttttaaagtatccctgcatcatggttaattcatataaatcagttaataaggttaaatccagcgctctcatggcgtacctccatatcgttattgttgtccaatcagactcggcaacttctgtaactgttcggtgtcagtatatacatccggtgtacggggcagatgttacaggcgctctttgtacttataatagaagatacagaacagttatcaattttgtatagtataccattttgaaaaaataaagtaaacctgtgggaaggaaatggaatgggaatacgtctgaaaaatgtggagatgaaaatacgaaaaaaacgccctgaaaacaggttaaaaaaatttttaaaaaaatttgaaaaaaacacttgcatttttctgagaggtgctatataatacatcttgtcgctgagcgatacagataaaaagcaaagcacaaaagacaatgggctatcgccaaatggtaaggcaacggactctgactccgtcatttcaaggttcgaatccttgtagcccagctctaagccttggatagtgatccaaggcttttttcttgctttacagaaaagtgctctccggcaaaaaaacgctccgcgaggatgcgccgggaagaatcccggatcggcaggaagagaaacgaaagattacaggaggaagggtcacgatgtatgcatttgaaagtaaagtccgttacagtgaagttggcgaggataccaggatgacactttacagtgtgctgaattattttcaggactgtagtgtatttcattcggagtcggtaggaagaggtacggccgtgcaggaagaattgggaagagcctgggtgctgaccggctggcagatcgaattcaggagagcagctgaccttggggaaagcatacggatctccacctggccgcatggattccggggatttgtcggagagcgtaatttcctgatggaaacactggatggggaagtcctggcttgtgcggactcaagctgggcatatatcgatgtgaaaaccggacatccggtaaaggcatcagaggaagaacgggcagcatatccggtggaggagaaactggatatgaaaccgttgggaagaagaatccggattccggaggagcggcaggagatgggagactttaccgtccgccagtatcatctggactccaatcatcatgtaaacaatgcacagtatatccgattgtcgcaggaatacatcccggctgattttcaagtgcagagactgcgggcggaatataagagacaggcagtgcttggagatcagattttcccaatggtttcgaaaacagaggacagctatgtggttgctttatgtaatgaagagaaagagccatatgcggtggtggaattttcctgaacataagaagtgaaaagtagagagatatataaagaaattaccaggaaatgaagaaattactgggagaagtctgcaaaatatattataatgaagcagaaataagcaatgacagaatgaaaagactgccatttcgtgaaatatgcaggaaacaacagatatcagatgaatggctgacgaatgcaagacagtctgagatcacacaaatacacacgcaggagtctgcgtgaacacagttacggaggaacgatcatgattgaattaggaagaagacagaaattacaggtagtaaaaaaagtggaattcggtgtctatcttggagaaaaggcagatgcgaaggaacaggagagggttcttctgccggcaaaacaggtaccggcggagacaaaagtaggcgatgaactggaagtatttatctatcgggattccgcagaccgcctgatcgcgacgacaagagtaccggctctggagcttcatcagacagcagtggtaaaagttgcggaagttgggaaaatcggagcatttctggactggggtctggaaaaagatctgttgcttccatataaagagcagaccgtaaaggtgaaaaaggatcaggaagtgctggttgccttgtatatcgacaagagtgaccggctctgcgcgaccatgaaagtatatccgtacctgaaaacgcagtctccgtatgtggtagaagaccaggtagagggaagaatctatgagatcagcgacaacttcggagtttttgtggcagttgatgatcagtattccggtctgatcccgaagacagaggcgcagggacagtaccgtccgggtgagaaggtaagctgccgtgtgacaaatgtaagagaagacggcaaactgaatctttctccgagaaaaaaagcataccagcagatggatgaagattccgaactggtgttaaaggtaattggtgagtatgcaggtgtgctgccgtttgatgacaaagtgtcaccggaggtgatcaagcgggaattcggactgagcaaagcggcatttaaacgtgcggtcggtcatttgttgaaagagaagaaaatcaagatccaggataaacgtatttacttgattttttaggcggcagttgctatactatacagtatattttggtaacgctttgcagtcaggatcctgtggaagaagcgggaagatgtaaggtatgactgttgacagtaaaaagatagtatgcagttggaaaagaaaacaactgtctgagtaataaaaggaggattatcgttggactcgatagactattataaccggtatgcggtgccctattatgaagaaacagtagatgcgagcatggaagaggttatgaagccgtttgtggaacttctgtccgaggagtcggagaatgcagaagtgttggatctgggatgcggttccggaagggacaccctgttattggaagaatatggattttatgtaacaccgatggatggctcagaagagatgtgtaaacttgcagaggtaaacacagacaaagaagtattgcagatgacctatgacgagatggaattcgatgatgtctttgatgggatctgggcgtgtgcctcactgattcatctgacggaagatgagatgcgcaaggttatgaagaaacttgtacaggcgctgaaggaaaacggtgtactttatttttccgtacatagaggcgaccgggatggaatctatcatggacgttatttccatgactacaacagaagggaactgcagagtctgatggaagaatatccggaactggaagtggttgatatatggaccacacaggatgtgcggtcagaaaagtcggataagctctggctgaatgtactggcacgaaaaacaggaaaagagtaaatgcaggaaagtctggacggcgtagtaccggccagacttttgcgttttatttggtacaggatataggaggaaaaccgatgggatttacacatttgcatgtgcatacggaatacagcttgctggacggttccaataagatcaaagaatatgtagcccgggtgaaagaactggggatggacagtgcggcgattacagatcatggtgtgatgtatggctgtattgatttttatcgggcggcaaaggaagccggaatcaacccgatcctcggatgtgaggtctacgtggcgcccggttcccgtttggataaagagatgcagcacggagaagaccggtattatcatctggtgctgctggcggagaataatcagggatacagtaatctgatgaagattgtttctgcaggttttgtggaagggtattactataagccgcgagtggatctggaagttctggaaaaatatcatgaggggattatcgcgttaagtgcctgcctcgccggtgagattcccagattcctgaccagaggtctgtatgaggaaggaaaaagagcggcactgcgttatcgggagattttcggaaagaataatttctttctggaattacagaatcatggaatccgggagcaggagatagtcaaccagcagctggtgcgtatgagcagtgagacagggatcgaactggtatgtacgaatgatgtacattatacctatgcggaagatgcaggctcccacgatatccttctttgtatccagaccgggaaaaaagtgcaggacgaggaccgtatgcgctatgaaggtggtcagtactacgtcaaatcagaaaaagagatggcggcactgtttccatatgcgccgcaggctctggaaaatacaaaaaagatcggtgaccggtgtcatgtggagatcgaatttggcgtgaccaagctgccgaaatatgatgtcccggacggctatacttcctgggaatatctgaataaactttgctgggaggggctggaggagaaatatcacccggtgacggaagaactgaaagaacgtctgacttatgaattaaatacaattaaaaccatgggatatgtggattacttcctgatcgtatgggattttatcaaatatgcgagagataatgatatcatggtaggacctggacgtggttctgcggcaggaagtatcgtttcttattctctggggatcacacagctggatccgatccggtatcagctgctgtttgaacgtttcctgaacccggaacgagtatccatgcctgatatcgatattgacttctgtttcgaacggagacaggaagttattgattatgtggtgagaaaatacggaaaggaccgtgtggtgcagattgttacttttggtacgatggcggctcgcggcgtgatccgcgatgtgggaagagtgctggactttccgtatgcgcaggtggatactatcgcaaagatgatcccgaatgagttaaatatcacgattgacaaagcactgaaaatgaatccggaacttcgcaatcagtacgagggtgatgagcagatccattatctgatcgatatgtccaaacgcctggagggtctgccgcgtcatacgtcgatgcatgccgccggcgtggtgatcagtcagaaagcagtggatgaatatgtgccgctttcccgtgcctcagacggttcgatcacaacgcagtttacgatgacgacgctggaagaactgggacttctgaaaatggatgtgcgaattgttcgctaacgaaacactccagagatggaaacaagttagcggagcaaggaaatgaaatattggaatacagttggtacaaaagtggtcagaacccacctgctggaaaagatagagtaatgaacttgtttaactattagtttgatatagagtggtgaaattccacttgaggaataaatgtcgatattcctaccctgagactccgatatgctgtttagccttaacgctaaatggtataaagctcggtaaagtcggctgaaaagaaacctacatggatgaaatatataagtaaaattggtacaaaagtggttagaacccgcctgtttgaaagtatagagtaagaagtatggtgacgaagtaagtcgggggtccttaagatgaataatctttaaaaaataatatgcttactcaccgggaactgtcgtatgaaaggctcgtaatttaagaccccattgaaaaatgggttgtccctatcgggaaactaatcgtagtagtattattgtccattgagactactatttttatcgcacagacgatattagttctgattccattcgactaaaggaagaaagaacggttagcgggttaaagacagaagctaagttattataataaaggataaaactaatggaacaattgaaccttgaaagaaaatgttaaggcagttaagtgccaatgattctaataagtaggaaatgacttatgaattcaaggggcagcagcccgtagtaccaatgaaggtggtgataagccattggagggaaggggcatagtcgtaaatagaatattgtaagaatagtttaattgctaaggtagccgctgagcgaaacgaactaaccaatataaagtgtcacggaggtgatgctgttggggacaaaacttaacaaggttccgtcaaatgaagcagaacttaacaaactcttacaagacatttatttgaagacaaaggaaaactatgaaagtgatataaaaagcaactttacaggtattcttgaaattatagcatcagaagctaatataattacatcaatccataaaatcaaagccaacaaaggtagtcatactgctggtatagatgagaaggaaattgatgattacttaaataagggatttgatgaagttatagaaattgtgagagcaaaattatatgactacaatcctagtatggtgcgaagagtatggatacctaaacctggtaagtctgaaaaaagaccacttggaattccaacgattattgataggataattcaagaatgtgtgagaaacatcattgagccaattgcagaagcccagttctttgaacattcatatggcttcagaccaatgaggtcagctgatatggcgatagcaagaatcaaacacataaacttccatgctaaatgttattgggtcgttgaaggagatataaaaggcttctttgacaatatagaccacaatacaatgataaacagcttatggaatcttggtatcagagataagcgagtgcttagtatcattaagcaaatgctaaaagctggtgtaatggatgaatgtagtaaaagtgaattaggaaccccacaaggaggaataatatcaccactacttgcaaacatctacctaaaccgattcgataattttatgacaggtgattttgaaaggaaaaaacttaaaaaaccgcattccagaagagatggtgaaatatcagcaatgagaaagcacagcaatctcaaaacctgctattatgtcagatatgcagatgactgggttattctaacggatagccaagaggatgcagaaagactaaagtttaaagcaaagaagtatctacatgatactttgaagcttgacttatctgaggaaaagacattaattaccaacgtctgtagtaaacccattaagttcctaggggtagaaatccgaatggtaaagaaaaatgggaaatgggttaataaagtttcacctgaaagtgaaagattcaaaaggaagatgaaggatttaagtcgtgaaatattttatatcaggaaaacatcgactttggatgctgatagacttattgagaacatcaaccgagtaaattcaatcattgtaggactcatcaattattatagtatgtgcgaccaaattagtgtagtgattcgaaaatatgcctggttgttaaaatatacagcctataagtcacttaaacgatatggaggtcaatggattagagccaacgaagtttcaaatcttattggactgcactatgggcataaagccaacatacctgcaatcaaatataaagatatgtatataggagtcactgatataaattttgcaaaatgggataacccaagatgtaaaaatcaaaatgaaacaccatatacacccgaaggtagggagctttataacaagaggatgagaaaaaagggattaaaagtgcgaacggatgaagttaattcgacaacacacgcattctatataagaatgagtaaaaatccactatataactttgaatactttatgaatagaccatacacatacaacagagacaaggggaaatgtaagatttgcggaggatatattgaaccaaacgaagcaagatttcaccatgttgataagaagttgcctatgaaccaaatgaacaaagtgaagaatttaatcacagttcaccaatattgtcacgatttaattcatagtaatacagagtcaacaagtctgtcagaaaaaacactaaaaaatattgaaaaatatcgcaacaaatttaacggttaatatctgacaatattcgaaagtagtttaccgaagactactatttacgatggaacgctgtgtgcggtgaaagtcgcacgcacagtgtgaaggaggggaaaaggacaccaaacaggtaatgctgaggttgttccttacctattcctattttcttggattgcgcacgctgaccgtgatccagaatgcggtaaaactggcgcagaaaagcgaaggaatcgaactggatctgtcgaagattgattataacgaccaggcggtactcggaatgatcggaagcggaaagtgtgagggtgtgttccagctggaaagtaccggtatgaaaaacttcatgaaggagctgaaaccgaagagcctggaagatatcattgccggaatctctctgtaccgtccgggtccgatggattttatccctcagtatatcaaaggaaaaaatgcaccggatcagattacttatgactgtccgcagttagagccgattctggaaccgacctatggttgtatcgtttatcaggagcaggttatgcagattgtgcgtgatctggccgggtatacgctgggacgaagcgatctggtacggcgtgccatggcaaagaagaaagcagcggtcatggcaaaagagagggaaaactttgtgtacggcaatgaggaagaaggtgttccaggctgtatcgcaaacggaatcagcgagcaggtggcaaataaaatctatgatgaaatgacggattttgccaagtatgcatttaacaagtcacacgctgcagcttatgcggtggtatcgtatcagactgcctggttaaaatattattatccggtggagttcatggcggcgctgatgacctcgtgtatcgataatccgtctaaggtatccgagtatatcttaaactgccggcagatgggaatcaggatcctgccgccggacatcaaccgcagtaccggcagcttttctgtagaagacggcagcatccggtatggaatggcggctgtgaaaggaatcggaaagccggtgatggaagcgatcgtggaagagagagcgcggggcggtttattttcctcactcaaagacttttgtcagaggttaagcggaaaagaagtgaataagcggaccattgaaaactttatcaaagcgggagcctttgacagctttggcggaacgagaaagcagtttatgatgatctatgtgcaggtgatggatacggtcaatcaggagaaaaaatcttcgatgaccggtcagatgagtctgtttgatatcatgggcgaagaggataaaaagagctttgagatccgcctgccggatgtgggagagtacgcgaaagaaagcaagctggcatttgaaaaagaggtgcttggtgtgtatatcagcggccatccgttggaagagtatgcagatgtctggaaaaagaatatcacggcagctacctcggacttttatccgatggaagagagcggtctgccaaaggtgagagacggagcgaaagtaatcgtcggcggcatgatcacagaaaaaacgatcaaatatacgaaaaacaataaagttatggcatttatcacactggaagatctggtgggaacggtggaagtagttgtatttccaagagattatgaaagaaatgccgcactgatcgagacggattccaaagtgtttatcatgggaagagtggcagcagaggatgataaggcgagcaaactgatctgcgaaaaaattgtctccttcgatcaggtgccgcgggaactgtggatccagtttgccgaccggaaacagtacgagcaggaggtagcagaactctatgataccctgcgccagtccgacggcagcgatcatgtggtggtgtatctgcgggcagaaaaacagatgaaacatctcccggcctcgcgaagcgtggaaatcgaggataatctgattggtattttacgggaaaaatacggcgcggaaaatgtcaaagttgtggaaaagagtattgaaaaacagcttcatatgcattaaaatataaaacgataaggcgatagagccggatgatgcgttatccggtattagattagatatattagtggagggaacattatggcaaaagaactcaagaccattggcgtattgacaagtggaggagatgctccgggaatgaatgctgcaatccgtgcggttgttcgtcgtggactgagcaaaggaatgaagatgaaaggtatcctgaaaggatatgacggattgctgaatgaagaaatcattgatatgactgcaaaagatgtatctgatatcatcggtcgtggtggtactatcctgtatactgcacgttgcgcagagatgagaacagaagaaggacagaaaaaagcagctgatatctgcaaaaaacacggtattgacggtctggtagttatcggtggtgacggttcttttgcaggtgcgcagaagctggcgaacctgggaatcaacgcagttggtattccgggaaccatcgacctggatatcgcatgtacagagtataccatcggttttgataccgctgtgaatactgctatggaagcaatcgataaagtacgtgatacttctacttctcatgagcgttgcagtgtcatcgaagttatgggaagaaatgcaggttatctggctttgtggtgtggtattgccaacggtgcagaagatattcttcttccggaaaaatatgattatgacgagcagaagctgatcaacaatatcatcgaaggaagaaaacgtggtaaaaagcatcacattatcatcaatgcagagggtatcggacattccagcagcatggcaaaacgtattgaggcagctaccggtattgaaactcgtgcaacgattctgggtcatatgcagcgtggtggtaatccgacatgtatcgaccgtgtacatgcttctatgatgggatcttatgcagtagatctgctggctgaaggaaaaacaaaacgtgttgttggatacaaaaacggcgaatatgtggactttgatatcaatgaagcactggctatggaaaaaggtatttccgaatatcagtacgaagttgcaaaatctctgtctgcaaactattccaaataataaggcgagaataacggcggcataccttctgagtcggtatgccgcctttttgcattgcatgtcaataattggtccggtggaccgattttgactcgcgggcaacgagtcagagtccgtgcttgcatggaacttatatagaaaacaaaggaatgggtatactatgataacaagcagcagtaatgcgcaggtaaaacagatgatccagctgaataagaaagcccgggagcgcagaaaacaggatgtttttcttgtggaaggtctgcggatgttcagggaggttccaagggatcggctggtgaagacatatgtgtctgaaaactttctggaggatccggagcatgaggctcttttacaggggattccttacgaagtggtgaaagattcggtgtttgcacagatgagtgatacactgacaccacagggagtactcacggttgtgcgacagtatcattatactatggaggaactgatgggtgagaaggaacatccgttgtttcttgtgcttgaggatcttcaggatccgggaaatatggggacgattttccggacagcggagggagccggggtggacggtatctttatgagcaccaattgtgtggatatttataatcccaaaacaatccgttctactatgggttctgtttaccgggtaccttttgtgatcgcaccggatcttcaggatgtgtttgcatggttcaaaaagcaggggattcgttcttatgcggcacatctgaaaggaaaaggctggtatgatgagcaatcgtatgtcggaggaaccgcatttttgattggaaatgagggaaatggtctgacagatgcaacagccggtcaggcagactgtctgatcaggattccgatgaaggggcagctggagtctctgaatgccggggtggcagcagctattctgatgtatgaggcatccagacaaagaagaaaggagtataaataaaaatgagtgagaagatggataagaaagctttgaagaaaaagaagaagaaaaaatccatggtgatgaaatcggtggttctgatccttttactggttgttctggcagtatgtattttctttctggcgaagactctgaaaaaggatcaggcgcagggaagtacacagaaaccggatacggagcagagtcaggatggcgcagatgctacggatgatacggaaacaggagacgatgcttcttctgacgcacaggatacggcagcacctgcaacagatgcaaaaacgacggcgatggagcaggccgagtatctggcagctacgtatgattatgatggtgcgatcgagacgttaaatggcgtggagggtgcagctgatgacccggagatcacggcaaagatcgctgagtatcaggcaacgaaggacagctgtgttccggttaacatggatgaggtgactcatattttctatcattctctgatcgtggatccggatcgtggttttgcgggagatgacagtattgcagccggtttcaagcagtggatgactacggtggatgagtttaataagatcacgcaggcaatgtatgataacggatatgtgctggttcgcctgagagacctggtggtcgagacaacggatgcggatggtacagtgcattttacgccaaatacggaactgaagcttccggctggtaaaaaagcattcgtgatgtcgctggatgatctgagttattatcacagttacgatggaagaggtattgcttcgaagatcgtgctggatgaaaatggaaaacctacctgtgagtatgtgcaggcagatggaacaactgtaacgggcgcttatgactgtgttccgcttctggatcagtttattgcagagcatccggatgcatcttatcacggtgcgaagggtatgatcgcactgaccggttatgatggaatcctgggttatcgtacggatatcgcttataagacgcatgagaatctgaccgctgatcagcaggcgtggctggatgcacatccggactttaactgggatgacgagtgtgctgaggcaaagaaggtggcagacgcgatcaaggatgatggctgggaattcgcaagtcatacctggggtcatatccggatcggggatgcaagcatggagcggatccagacggatacgcagaagtggctggagtatgtagctccgttggttggcggaacggataccattatttttgcacatggacaggatttggcggactggcatgattatacaacagataatgagaagtttaattatttgagcagtcagggcttccatttttattgtaatgtggattcgagtcagtatttcttacagattcgggataattatgtgcgtcagggcagacggaatctggatggataccggctgtggaatgatgttcacggagatgtgaaccggacgagtgatctgttcgatgcgagcaagatactggatccgcggaggacggatgtgccggcactgtaaactatagaatgtgtttaatgccctgtcgggaggggaagctttccggcggggcgttttttattgcgttggatatcaatcattggtttggtgacccgattttgattttggtggatatacctattggaaaaccggacgaaagtccgcacttacccgataaggccagccaaccgctggcaacgccgatctgagctaagtcctaagaagaactaagatgccagttcgcggagagccgctcactgtcaagttcttctaaggactggatctcatctcggctaagggcgccagcaaaaggctgtctgtccttatcgggtaagtgcggactttctgagtgttggcggcgggggaggtggttgtgtggggaaggtattggcagtggggaagagatataacaaacagatggcaggatgaatgattactggtggggcggacgaaagttcacgcttacgcaataagaccagccaaccgctggcaacgccgatctgagctaagtcctaagaagaactaagatgccagatcgcggagagccgctcactgtcaagttcttctaaggactggatctcatctcggctaaggacgccagcaaaaggctgtctgtctttattgcgtaagcgtgaactttctgagtgttggccacggaaagggttgtgtggggaacatatcggcaatgataaggtgacaatagggtataaaaagtaaggcaggtgtagtggagatgtcagtactcagcagaaggaggcgggcaccaggggtgggcaacactgtgtgggcggttagggcaagctttaagatccgacgcttacgtaggctttcgcgagggtcagctgaccctcgcgaattatagccgaagttagcggctagcttaaagttgtcctgcccacgttgcccacccctggtgcccgcctccttctgcgtccgtctttaatcacatttcatcataatgcacaattctacatttcatctcaaatatcgactccaaagcccacaatccctaaaaattttcagaaaattccacgaaattcaccgaaatgttcctgttgacaagaaaagttaaatttgttacaatcacaccgtaacaaatcgtaacaaatttgtaacaaatcgtaaaaagaacgaaatcaacaggaggtaattcaagtgaataaattatggaaagcagcagggatcctgggaggtatgctggtcgttacagcgggatcaggaacactggtacttgccgatgagacatccacagaagttacagatgataattccgggagttcggttctcgatacggatgaatgggcgcagaaagcagctgcgaatgtaaccgactatgccaatatccgtcaggaaggttcgaaggagagtgaacgtgtaggggtactgccgaagggggcagcggcacaggtgatagaacagcagggagactggacgaagatcacgtcaggatctgtagaaggatatgtaaaatcagaccttcttgtatttggcgaagaagcaaaacatctttatgaggaatcctacggcagtcagggaactgtgacagcaagttctctccgggtacgcaaagagccgtctatggatgccggtcagataggaagtatgaaacagggaagccgggtagagattctgggccaggagggagactggtatcaggtgtcatgtggggaagattcggcttatatgtttgcggagtatattcagatagaagaaactacaggactcagtgttgcggaatatgagacacagcagaaagaaaaagaacaggctgtgcagcaggtcagccagacaggagcatccatgtctgcatctgacagtgaactggcgcttttggcagcaattattcagtgtgaggcagggggagaaagccacacaggaaaagttgctgtaggagcggttatcatgaaccgggtaagaagcagtcagtttccgaacagcattacagaagttgtctatcagagtgggcagttttctccggtagccagcggaatcctttcttctgtattgagccagggagcaagaagtgattgttatcaggcagcgcaggaagcgcttgcaggatccaatccgatcggaagcgcactgtattttaacagtggaagcggtcgtggacagcagattggaaatcagcatttttattaaaagccagcaaaagaaaatgccatcaccgaaggtggttttgaaggcactttggttcataactgtgaaggtactgaacagttactgattaatttaagataagaagggaaagtaccccgtgcacctgaaatgtaagaactaatttaaaaaaatcttacaatttcagaaggcacggggtatttcgttgcgttttcagacaaaatagtgtatgatggaagaaccatagagaaaagcacgcagcggataatcaaagttatatttttcgactgcagggaatatgcaaggatatggaacatgtttctgaacagaggataaagaaggaacatgcgtaacataccggaggaaagggggaggaacatggatgcgattctatggctggcagcggttgttgtattgctggtgattgaaattgccacgctgggccttacaacgatctggtttgccgggggtgcactgattgccgggatagcagcggtagccggtgccggaagagtagtacagtttgttttgtttctgattgtctcactgatcctgctgatttttacaagaccgattgccatgcgatacctgaataccaatcgaacccgtaccaatgcggaaagcctgattggcaaggaggcggtggtaacacagacgatagaaaatctgaagaaccaggggcaggttatcgtcggtggtatcgaatggacagcacggaccgatgataatgaaaaaatgattgaaaaagatacggtcgtggagatcgaacgtatcgaaggtgtaaaattgattgtgaaaaagaaaggataacaggtaagaaaaatgggtggacttatatttctgattttgattttagtgttagtggttgtcattgtaacatcctgtatcaaagtagttccacaggcaagagcttatgtcattgagcgtctgggactgtatcagggaacctgggagccgggattacattttaaggttccggtgattgaccgtgtggcaaagagggtaaatttaaaagaacaggtagtagatttcccaccgcagccggtaatcacaaaagataatgtaacgatgaggatcgatacggtcgtattttaccagatcacggattccaaatcctatacttataatgtagaaaatccaatcatggcgattgaaaatctgacagcgaccacattgagaaatatcatcggtgatatggaactggatgagacgctgacttctcgtgaagtgatcaataccaagatgcgtgcggcactggacattgccacagatccgtggggaatcaaagtcaaccgtgtggaactgaaaaatatcatgcctccggcagctattcaggaagccatggagaaacagatgaaagcagagcgtgaacgaagagaagcgatcctgatcgcagaaggtgagaaaaaatccactgttctggtagcagaaggtaagaaggaatctgcgattcttgaagcagaggcggaaaaacaggcagccattcttcgggcagaagcagagaaagaaaagatgatccgtgaggcagaaggtgaggcggaagcgatcctgaaagtgcagcaggcgaatgcagatggtatccgtttccttaaagaggccggtgcagacgaatccgttctgacactgaagagtctggaagcactgaaagatatggcagaaggtaaagcaaccaagattattgtaccgtctgatctgcaggggctggccggactggcaacttcactgaaagagattatgacagataaaaatattgagaaaaaataaatgatttataaaatgagggggtaatgttcttcggggagacctgagggcgttgcccctgatttctattatggaggaataaacagaaaagcacaggaaatgaaatattatgagaggatgctgtatataaaacaaagatagcagtagatggtaagaggagaacaggaggtgtgaatatgttgacaccggtaattgataccagcaaagaatacgggctggttctggaaggaggaggtgccaagggcgcatatcagattggagcctggaaggcactgaaagaagcaggggtaaagatcaatgctgtggcaggaacaagtgtcggagcattgaatggcgcgctgatctgtatggatgaactggagatggcgcaacagatgtggagtaatctgacctattctcaggtgatggatgtggatgacacaaggatggagcaactcatggaaggggaggcacctttctgggaggctgtaaaagatgcgttccgtcatatgagtgagggtggcgtagatgtgacaccgttaaaagacatgctggataaagtggtggacgaagaaaaaatcagaaattcatccattgatatttttatcaaaacattcagcgtggatgccatgaaagaattggatattgatctgaaacaggtagaaccgggactgatgaaagattttctgctggcgagtgcttatattttcccgttatttaagaatgaaaaacttcatggaaaaacgtatattgacggaggagcgatcaataatgtgccgctggactctcttgtggatcgagggtatgagaatattatcgtgctccggatcttcggaatcggcagggaaaaaagggtaaagattccggaagaaaccaatatcctgaccattgaaccgagagtgaatctgggaaatattatcgactttaaccataaaaagagtgtccggaacatgaaaatcggatattacgatgcgaaaagaatggtctatgggctgaaaggaaagatttactatattgaagaaaatcaggaagaatgttattatttaaagcagttggtgcagattccggagagcagtctggagaaactgtgccggtggcatcacttcaaagggagtgcagaaacccgttacagaagcctgacggaattgatcctgccgggaacggctctggaattaaagctttccagagagtggaattataaggaactgtatctggcggcactggaagccacggcgaaactgtgccgggtatcgaagtaccagatttacaccgtagaaggacttgtggaaaagatacaggaaaagctggaccgtatgccacaggaagaacgggaaaaacttccggcatttaccgcatttttcgaaacgtgtgaagtatgacgaatgttttggaagaaaatagggtggataccgggaaatgaatttacagaaagaggaggaattatcatgaatttaaaaggacgtcattttctgacattaaaagattatacaccggaagaaatagcatatctgctggaactgtctgcagatctgaagaagaaaaagaaagaaggagttctgacagacacgctgcgcgggaaaaatgtagcactgattttcgaaaagaccagtaccagaacccgctgttcttttgaagtggcggcacatgacctgggcatgggaaccacctatctggatccgaagggatcccagatcggtaaaaaagaaagcatcgcggatacagcaaaggtcctgggcagcatgtacgaaggaattgaatatcgtggctttgggcaggaaatcgtggaagaactggcgaaatatgcaggagttccggtatggaacggtctgaccaacgaatatcatccgacccagatgctggcggatatgctgaccattcaggaaaacttcggaagactcaaaggcatcaaactggtctatatgggtgatgcaagatataatatgggaaattcttacatgattgcctgcgcgaagatgggcatggattttgtggcatgtgcaccgaaaaagtatttcccgaatgaagaactggtagctcagtgtcaggagtatgcaaaagcatccggtgccaccatcactctgacagaagatgtgatggagggaacaaaagatgcagatgtcatctgtaccgatgtatgggtatccatgggtgagccggacgaagtatgggcggagagaatcaaagatctttctccatataaagtaacgaaggaggttatggcaaacggtaagaaagaagcaatcttcctgcactgtctgccatctttccacgatctgaataccggtatcggcaaagagatgggagaacgttttggcctgaaggatatggaagttaccgatgaagtcttccagtcggaacagtccaaagttttccaggaggcggaaaaccgtatgcataccatcaaagcggtgatggcggcaactctgggggcataatccatggagtcaacaaagaccagaatcttaaaaaaactgctggagacggatggctatctgtcaggtcaggagttgtgtgaacagctgggagtttccagaactgcggtgtggaaatacatgaaacagctgaaagaagaaggctatgagatcgaggcggtacagaataagggatattgtctgaaagatgtgccggatgtgctgggcgagagtgagatcaagagccgtctgcatacccgttgggcgggccagacgctgtattattatgatgagattgattctaccaatacccagatcaagcggctggcagaggaagatgcgccccatggaacccttgcggtggcggattatcagagtagaggaaaagggcggcgtggacgagcctgggattctcctcacggaagtgctatttatatgtcaatcctgtttcgcccggagatccggccggatcgggcttcgatgctgaccctggtgatcggactttccgtgacccaggcgatccggagtaatctgggtctgcaggcacagatcaaatggccgaacgatgtggtgctgaacgggaaaaaattagtaggaattctgacggaaatgagcgcgcagatgaactatattgaatatctggtgacaggaatcggaatcaatgccaatctgcgggaatttccggaggagctggaagataaagctacgtctctgcaaaaagagatcgggcataaagtcaaccgttctgcactgatcgcagaatgtatggaaaaaatagaagaaaattatgagatatttgtaaagacacaggatctgagcggactgatggctgcctatcaggaagcgctggtcaatcaggatcagcaggtgcgtgtactggaaccgggacatgaatacaccggtgtggcgagaggaatcaacgccatgggtgagcttctggtagaaaaagaagacggaaccatcaccgaggtttatgcgggagaggtatctgtccgtggtctttacggatatgtataggaggaaagatgtacgcagatcgaatcgttttatgtggtgccagtgcctacgaacagaaatattattttaatccggattttgacgccctgccacagcaggtaaaagaagaactgcagatcctctgtgtgatgtatactgaggagatcggcggtatcctgacactggaattcgatgaggacggaaacctggaattcaagacagaagcgctggatgcggatgcgatgtatgatgagattggcagcgtactgcgcatcaaacagatccggaaagaaaaacaggagctgctggcatctctggagatgtattaccgggtattctttcttggggaagagatggaagacggggaggaaggatgaaacttcagattggaaatgtaacattaccgaacccagtggttctggctccgatggcaggtgtgacagacctgccatttcgtctcctgtgcaaagaacagggggcaggacttttgtgtatggagatggtcagtgccaaggccatttattataagaataagaatacacaggaactgatgcggatcctgccggaagagcggccggtatccttgcagcttttcggctcagacccggagatcatgagtgagatggcaaaacagatcgaagaaaagccgtttgatattttggatgtcaacatgggatgcccggtgccgaaagtggttaataatggtgagggatccgcactgatgaaaaacccgaaactggtccgtgagatagtaacggcgatggcaaaagcgattaagaagccgttgacggtaaagatacgaaaaggatttgacgatgatcatgtgaatgcggtggagatcgcaaagatcatcgaggacagtggtgcagccgcgattgcggttcacggacggacacgacagcagttttattccggaaaagcagactgggaaatcatccgaaaagtaaaagaagctgtgtccattccggtgatcggaaatggagatgtggattcaccacagaaagcaaaagcacttctggaagaaaccggatgtgatggtgtgatgatcggtcgtgccgcgcaggggaatccatggatctttgcacagacggcagaatatctggaacacggcacagtaccgaagaaaccggagctttctgaagtgaaggagatgattcgacgccatgctggtctgcagatgaagtataagagcgagcttaccgcgatgcgtgagatgcgaaaacatgtggcgtggtatacggcagggtatccacattcggcacagcttcgggcagcagtgaatgaagtacagagcatggaagaactggaacagttgctggaagggtggaactgatcaggatcataagtttgtgtattgcgaaacatgtcagtgagaacggagtgatcagtaacacaaggggagaatcggcagacgaaaacttccggaatggttgacattttcacgcgtttcctttataatactgtgattgcacaagggagaaaaacaagttcttcaagtaccggaaagcacagaatccatagtaaagtgaaggtgaatggaagtttctggtatgcaatgtaaaaacgtgtaatatctataaataagggacataatctaacgcagaaaataaaatagaaataaagagtgatcataccgtgtcagatgatcacggaaagaaaggaaacgtagaaacatggaagcaaagaaaaacttactcacatatgccggactgaaaaaactggaagatgaattacatgacctgaaggttgtaaaaagaaaagaagtagcagaaaagatcaaggaagccagagaacagggagacctttccgagaatgcagagtacgatgcagcaaaagatgaacagagagatatcgaacttcgtattgaagagattgagaagatcctgaaaaatgcagaagttgttgtggaagatgaagttgacgaaggcaagatcaacgttggctgcaaagtaaaagttctggatatggaatatgatgaagagatggattttcagctggttggttccacagaagcaaacagcctgcagggaaaaatctccaatgaatctcctgttggaaaagctctgatcggagcaaaacagggtgatgtggtagatgtagaactggctgacggcgaagttatgcagtataaagtattgaaaatcgagagaaatatctaagtaacaagcaatataagtaactatcagcaaaagatcagaagcgctgttttcagaatgggagacagacgcatcgcagcgaaaaagaaggagtgaaaaaggtggcagagcagaagaagcaggagcaggatacgaatcagttattaaaggtgcgccgtgagaaactggcagaactgcaggcaaacggcaaagacccgttccagattaccaaatttaaccagacacatcattcccttgaggtaaaagagatttatgaagcgcatgaagcggaacttctcaaagaccataaggaaccggaagtagaaggtctggatgaagaacagaaaaaagaagttctgaagaaagactatgaagaaagaagaagcatcatggatgcaaacccgattcatgtagccgtagcaggccgtatgatgttcaagagagtgatgggaaaagcttctttctgtaatatccaggatctgcagggaaatattcaggtatacgtggcaagagatgccatcggcaccgattcctacgcagattttaaaaaatctgatattggcgatattttcggtctggaaggatttgctttcagaacaagaaccggtgagatttctatccatgcagagaaaatgacgctgttatccaagagtttacagatccttccggaaaaattccatggtctgaccgatacggatacccgttatcgtcagagatatgtagacctgatcatgaaccaggaaagcaagaaagtctttatcaaacgttctcagatcctcaaagagatccgtaacttcctttccggacgtgactttatggaagtagagactccgatgctggttgcaaatgcaggtggtgcggcagcaagaccgttcgagacacattacaatgcgctgaacgaagatgtaaaactgcgtatttctctggagctttacctgaagagactgatcgttggtggtctggagagagtcttcgagattggacgagtattccgtaacgaaggtgtggacacccgtcataacccggaattcaccctgatggagttgtatcaggcttatactgattatgaaggtatgatggaactgaccgaatccatgttccgttatctggcagaaaaagtctgcggttctacaaagatttcttacaacggtatcgagatcgatctcggaaaaccgtttgaacgtctgaccatgaacgatgccatcaaaaaatatgcaggtatcgatttcgaccaggttgcagatgatgaagctgcaaaaaaactggcagaagaacatcatatcgcatacgaagagcgccacaaaaaaggcgatatcatcaacctgttcttcgaagagttctgcgagaaagaactgatccagccgacctttatcatggatcatccgatcgagatctcaccgctgacaaagaagaaaccttccgatcctacaaaggtagaacgtttcgagctgtttatcaacacatgggaaatgtgtaatgcatactcagagctgaacgatccgatcgatcagcgcgaacgtttcgcagcacaggaagaagcatttgcagcaggtgacgatgaagccaaccatacagatgaagacttcctgaacgccctggaaatcggtatgcctccgacaggcggtatcggatacggtattgaccgtctggttatgctgctgacagacagccaggccatcagagatgttcttctgttcccgacaatgaagtcccagggtgctgcaaagaacgaagcaaataatgcagctcagtctggtgcagcagcaccggcagaggctgaaaaaacagttgagaagattgatttttccaaagtaaaagttgagccattatttgaagaaatggttgatttcgatactttcagcaagtctgatttcagagctgtaaaggtaaaagcatgtgaagcagttaagaaatccaagaagctgttacagttcactctggatgacggaacaggcacagatcgtacgattttaagcggtattcatgcttattacgagccggaagaactggttggaaagaccttaattgcaatcaccaacctgccaccgagagccatgatgggaattgaatcttgtggaatgcttctcagtgcaattcatgaggaagagggcgaagaaaaacttcatcttctgatggttgataaccacattccggctggtgcaaagctgtactaaaattaaatattaaatgtctaaaaccatgatgtcagaccgcatttgacaacaatttgacaacaaaatttgggataataatgaatcgttatgaagcatgacgaatttcaggtgaaaggacacaggtttggcaatgaagtaagagcacttcttagagttaatctaagaggtgcttttttgcgttgcatatcaaagaggcgccagtggcgcgtctgatgattcggccctggaaagttatatcccggcagtcagcttctgtaaaacagcaaatctaattttggaggaaaacatcatgggtaaaagttataaaccaattacaagtatgaaggaagtaccagagcagcttagaaaattacgccgacagtatctgcgttatcaacaggcagagattatttacagcatttctcataagaaactttttgaactcgccagtgatgcaggtgcaatttacagaatagatggaaccgtattgattaaccgggatatttttgatgactatctggagcgttttcatgaaccggcaacaggaaatgataaggagaagaagacggatgagcggtaatgtatggatgttttcagatgaaatcgatgatgaagatctggaatttatgcgccatgattacgtgacctataacatggcgtgcgaatactacagactgggaatcaaacccgttgtccgtatggcacatgaagcaggggcagtatataaaattgggaaaaaggtgttgattcgaagaagtatatttgaagcatatctgagagagaagagaaagatttgatggaggagaagaacatgagcaatcagagaaaaatactacatgatgacaggaatggattagattatgtgttggtaggagattattacctgccagtgctatcattaccggaagaaaccagaccgattgggtactggggaatgcttcgaaaagaatatatgaaaaactataaatcaggtatgtattcttatcttctgttgactgggaaattggacagctatctggcagatctgaatgaacaggcacaggaacggtatgaattgattgaggcacaaatacgaagtgcggagggagttacagaggaattaaaagcatgtaatcctatggagtgggtgcgacagtgtaataatgtcgagaatcgtgtgcaggaaattgtattgagtgaattggtatatgtataggaggagcgtatgagatacaggattgaatatgctgatggaagatgttgcaatttcgcaaacagcagaaaagatttactggattggttgaaacttctgaaagatgaacagattgttgatatccgtaaaatctataaaagcggtgttacagattcagttctggatagttaccgaagatatttaaaatagtgaaggggtagatgaagatgttgaagcatatatgagccagcaccgtcatgatacagacatacaggaattgaaaacatattttacaagtgtgatagactggatttctggtgtatttagtgatgtggaaagtgaaatgcgtgggattgagtggggaagattatttgaaacttatcataaccaaccatatgatccggtggaagcaggaagcggcacataaggaagcaccgaaagtaagagaagataaagccagatagatgtgaggacgtgggagaaatcctgcgtccttttttaatgcggataaatatgatagatggtaaatagtgtgttgttattactcggtcaaccgactatgatatatagtgaatattttgtagaagatagaatgtctggtgacagatgaaaagcagcataaagaatagcggtgaaattcaaacaaaggaaccttacatcaaatgtaagtggtgtatttatgctttgtgtagtaaaattttaattgtaaaaaagtatgaacaaaaaagaggtgttaagaatggattatacaaaaaaacttttagaagtacgcgacctgcacaaagcatattccaaagagggcgttcccacaaaagcactaaacggaattacctttgatgttctaagtggcgaatatttgggaattatgggagccagcggttccgggaaaacaacattattaaattgtattgctacggtcattaaacctacctctggacaaattttgctctccggggcgaatataagtgcctttgacggtgctaagttagcggaataccgtggaaatagaattggttatctgtttcaagactttgctttgcttgataatttgacaggcagagaaaatattctgttgcccttatccattcacaatatagatagttccatagccgaaaagcacctaaatgatatagccggatttcttggaattattgatgttctttcaaagtttccggcgcaaatgtccggcggtcaaaagcagcgtgtagccgcagcccgtagtttgatttctaatccagatattattttggctgatgagccgacaggcgcattagacacaaaagctgcacggttgcttatggaaaaattacaggaagtcaaccaagtgcaaggacgtaccattttaatggttacgcatgaccctaacgcagcaagtttctgttcccgcattttgttcatacaggacggcgttattttccatgaattgcgtcgcaaagttccgacagaaacacgggaagaattttatgcgcgcatattacaggtaatggcgcaaatgggaggagggagcgcaaatgttctttaaccttgcatggagaaattccaaacgtagccgcaatgaaaatctgatttactttctgacaatggtaacggcggtagcggcattttacattgtgctttctctcggagcgcaggacgttatacgctttttaagcagccttgaaagcgatgccgtggaacggctgcttacaaaccttttacctactgtctatgtttgtgcattattatttgtatttttccttgtagtatttgcaaataagtatcagctcgaatgtcgcagccgggaactaggattatatttgatgtttggtatgacaaagacccgattatttacgcaaattatgacggaggggcttatcacttcacttgtcgccctcttgggtggacttatctgcggtggttttctatccgaagttatcagccttgcaacggcacgtttagtcggacacggtgttattgcacatcaatcaagtttttcattaagcgcagttttctttacgatattgggatttttaatcatccaatgtgtggcgttgtttatactatgcggaaaattgtttaagaaagaagtccaccaactgctttatggagaaatgggaaaaaaacaacacacgggcagcacacacggaagtttgctatcccttgtaattggtacggcagttttacttgttgcatactgggttgtcatagaacacttcatgactggcggtggtgtaatgctgcttgttgctgtcctgcttggaattgttggaacaattctttttatccgaggcattgcccggcttttaagtatagtagctgcttctaacaaacggaaagcgacaaatggactttatgtatttactttgcgacagcttcacgagaatgttgtttataaatatatttcaattagtgttgcgtctattctgatgatgcttaccattatgtttattgcaaatggttctgcaactattatgtcgcatgggaatgaattaacaagaacttctgctgtttatgattttacagtaatgggcgaagaacagaatgttgagcaatacctttccgacgaccaaatgcgagtttatgtagctaatcttaaccgtatggaaacagggaacatgaaacgtcctgcttccggggaaatgaaatcctttgttgactggtctgtattaagaaaagagattgttcaaaacttgccagagggtgtaatagaccctgcgacacaagaagctgccagttacgaatttggttcacatcaacccgcagcccttaatctgcttggatttattgatacggggagtgtttctccttatatgctcccagtttcatcatataatcgcctgttggaagccgcaggagaaaagcaaataaatcttgaaaatgatgaagctgttttttacctcaacccggactttttagaagatgaacaggaagataccgttgctctgttagacaggattgcagagaacgcacagacaagcggtaatgcgttgatttccattgacaaaaagtcagttacacttgttccgtctgtaccgatgaaaggacttaccgctgatgaaaatgttaaaattgtaaccgcattgattgtttccgacgagatatatcataactatgtagacccggacacctgttctgtatattggaatttctgtattccgaatgagattgtagaagcaaacggactgatgctgtccgttatggaagcacgcgatttgctgaagccgtccggtctgtattacgaaagctatcttgataatttcggacggcaactattttatcttatctccgggagttacatgactttatatatgggctttatgctattgattatcgcgtgtgcattgcttgctttgcaattcttaacacaaatgcaatcgacaaaatcaagatatttgacactctcaattttgggtgcgaggcgagaacagataaaacggtcaatttataaacaagttttatggtattttctactccccctaatgttggcttgtataagtggtacggttggtctttatgcaatgcagcagcatttatactctgacagcacaaggatcgggcaatcttatccgttgttgattattatggcatttactgtcgttcttattatggcaatttacggtgtggctgttgcgcggacagctacacgggaaatcggaaaaataaattacaagcctaattcataacaggcttacgtgaaaggaggtggtcgtattggcacgaattatggtagttgaagatgatgtttatatgcgggaagaactgacggatttattgagaaagtcggggtatgaaacagcctcgttatttgattttgaaaacgcaataccggaaattacagagtattcccccgatttggttttacttgacataaatcttccatttcattccggctttgaaatctgcaaagaattaaaagcaaagcagcttggaacagtgttggtattgacagcaagagataaattgcaggacgaacttcacgcattaggattgggagctgatgactacttaacaaagccgtgtaatatagagcgcctgcttgcccgcattaaaaatttattacgacgcaaagaggaacagatacggcaaggcttactggacgggaacggatttttacttgacccaaacacctttacaatttatgtggggaagagttcttccctcatgccacccaatgagggaaaaatattgcttgcgcttttgaagaaaagccctaatcttgttaccaaacatgagctgtgcaacgtgctttggggaacggaagaatgcattgacgaaaatgcgctgcaagtaacttttacgcgattgaggaaaacgctccgtgaatttggtcttgaagaacggatagaaacagtacgcggacaaggctaccgcttgaaagagcaggtgcgattatgaagaagctaaaaatatttttaacctatatttcctctaatcgtgtatggattatcacacttgcctgtttggacgtattctttatattccttgcctggctggctaatccagattattttatcaattatgttgcattgatcattttcgtatcatttgccacacttgctatcccgcttgctatatcaatcagaaaacgcaacaagacagacgctatttttcggcgttttctattggagccagacgataccaacgaatacttactgtgtgaagctgttcccgcagtattacgcccttatatctgtgaattggggcagcatttgaggacgcagcaggaatatatcaacgaacagaaaattacagttacagattatcaacactacattgaaaattgggtacatgaaatcaaaaagccgctatcccttatgaccttgctactggacaatcgaaaagatgaaatgtcccctttggttcatacccgtatgctgtatgtacgcggccatacccgacaggatatagaacaaattctatacttttcaaggcttggggctactcataaggattacttttttgagccgctttcaattcttgaaatttgtcgtgaagcagttgaagataatttaacgcttcttgaagaagctggattttctgttgaatataccgaaaatgatgctcaagtgatttctgacaaaaaaggtttgatgttcattttaggacagataatcagcaatagtgtgaaatatacggggaacaatcctgctcctcgacttctcttttccattgctgatagtgcggataatgaacagatttctttatctatgaaagacaacggcacaagcataccgttgtctgacttaccttttgttttcgacaaggggtttactggagatacgggcagttaccttagtcgttctacgggtatggggttataccttgttcagaaaatggcaactgacctgtctatcacggtggagctaaaaaacaattcttgcggtggaacaactgtaaccttgacgttcccgaaagtggagcgtccatttgggaggtaatgaaatgcagttacaaaacgaaacaataaaagagcgcacaccaataaaaggcttgctcattgattggttgattatatttggaacatatctttttatccgtgtattcttcgccctctttgggcttcatcagaatattgtcattttgggctgttgccttgcggtattgccatatcttttgggggcagtatatttacagaaatcccacaagcaatgtccattatggctttctgcatcggctattttaataccgtccattgttgaaaaaatagcgatatatttatttggtgcgtacttatacaatttaagcccgataaatgttttaggagttatggaagcgattaagagtaacgcatcatacacaaacttcattaaaaatcaatcagcacagaatttaatcaatctatcatatttgaattggacatacattctatgcagtatagctatttctgttttggttatcttgcttttaaatcagacaaaacagaaaagtaataaaggataaagagaactttatgaaagtgacatagtataaaacatctgccactcgacggcaaaagaaaaaaaaacgtcgcacagcaaatatatagggttaattgtgagatgaaaatatgagaaattagctgtatttgatatatctgaatccggcagagagattggagaaaagttgatacttttgcttgatgaaagacaacggaaagaacttgcacagtattcgccatatattgcaataccaaaggtgtcttcgcaaaacagaagatatattccgatggattatcttgaaggagaaataattccaggcgataaactttttacaatgccgtcagccacaagttacgagtttggaatactaatgtccaatgttcatatggcatggaccagagcagtatgtggtcgactaaagagtgattatagttattctaatatgattgtttataataatttcccttggccttctccaacaaatgatcaaaaggaaaagataagaaaaacggcacaggctatcttgaatgctagagcactttatacagatagcaatcttgcagatctttatgatcctttgacaatgccaacagaattactgaaagcacataaagcaaataacagagcagtgatgcatgcttatggatttagcattaaaatgtcagaagcagactgtgttgctgaattaatgagaatgtatcagaaattgacaaaagaaaaataatgattaccccaaagggcattaaccataagtggttagtgcctatttttttgctttttttcaaaatcatctgactttatacattctgccacatgtgattagtggaaaaatgatttttcaagaaaatctatgccctcacgttctctggaacatgcaactggagaagaagtagttcatttatgtacaaaaaacttgcaaaaaggggttggtaaataccatttccaacgctttataggtagaggaataattatttttcaaaatttcccaaaatcatgtccgattttgtcgctcccaatacagagtatatgaagggactaacgaaagtaaaagaaaaaatgataaaaatgtaaaaaaatatcacgaattttttgcatcgtgccaagtcatttgactttagtaattagaggacgttttggaatgttccttcactgaaccttgacaattgataagtgcaccctgaaagcctaccaggagttctgccatgacctttcttttctgaaagcaagcggaatcataatgacactcccgatgatgggcggatgatcaaagccttatgatcagtgacctgtgtatgcaggcagaggcagtctgagacggctgcaggtgacagggaaacgcacaatagaccgctgatgcaacaagtaactaataacaatgattaaagggtaaaatgcctggaaaggacgtaaaaactatgaatagagtgattttaatgggaagactgacaaagaatccggagatcaaatatgccggaaaagataatgatatggcagtagcaagatatacactggcagtgaacagaaaatataaacgtgatggtgaacaggaagcggattttatttcgtgtgtaacatttggcaagagtgcagagtttgcacagaaatatcttcacaagggaatgcggattgtgatcggtggtcgcatcagcactggcagttataaggataaggatggaaagacgatttataccacagatgtgattgtggaagaacatgaatttgcccagaacaaggacagcggtgctggagcagattcactagaaaccctgaaagcagataaagacggatttatggaggcgaaggatgaagaaattccgtttgactaataaaaacagaaatctgcctaataaaaatgtggaggttatttatgagtgtaagttataacagattgtggaaacagctcattgataaaaatatgaaacggatagaaatgcaacacctcaccgggattagtgcaaatatccttgcccggatgggaaaaaatcaatatgtatcaatggaaacagtcgagaaaatttgtaagaaaatgaattgtactattgacgagatgatggaatttatagattaaagatagcaagccggatacggcataattctcttagcaaagctaagagcgcacttctatacaggcaattacatctgcctgtatcgtgcgacctgcggtgccattcccgattttgaagaatttcaatccgggaatatagcgaaatcatagatttcggacaaggggataatttccccttgcggcacaaggcctatcttgttgtagcaattaaagatttttaagattacagaggtcagtatgtccttattgtggaacgacgacctcagttttttatattcaggaatcggcatttgtgaaaagaccggttctttttatttacagaaagagtaggaggttgaaaacttgagcagagcgaaaaatccaaaatatgaatccatgtcactggaagaactgaaagccaacatggaaaaaagtaaaaaggaactggaacatgcgctccacaataaaaatattctggagcagagaaagaagttggtggagcgaaaggaacgttctcacagattgattgttaaaggagcagagtttgaaaaagcatttccattatcaagagatctggaacaggaagaagttcaggatgttatgaaacagttgcagaacagtagttacaacaagagtatcgtgcggcaggttcacatagcagccttacacaaagagcaacagcagattgcagaagcagttgaaagagcagaaagaggagatgacagctaatggcactgtatcatttttcggtaaagcaggtgtccagaggaaaaggtcagacggtggttaattccgcagcttatatttcggggcagaagctttataacgattattatggacagacacatgactacacaaaaaagtctggagtggttttcacagaaatcctgactccggaatatgcgccggaacgtttgtctgaccgggaaacgctctggaatgaagtagagcagatagagaaaagtaaacgggcacagttagcttattcttttgatattgctttacaaaatgaactgacactggatgaaaatatagaactggcgagagagttttgcatggaacagttcgtagcacgtggcatgattgtagatctggcggttcatgagggaaaatcaaagaatgaggatgaaccagataatccacattttcatgtacttgctccaatccgtgcgtttacagaagatggaagctggggcaacaagcagaaacgtgaatatgttttggatgaagacggaaatcggattaaagatgccagaggaaaggatatattcaatgctgtttccactaccggatggaatgatccggaacttttaaaggaatggagaagagcgtggacagagaaggtgaacgaaaaattccgggagtgccatatggcagccagaattgatcaccgttcttacaaagagcagggaattgacctgattccgaccatacatgagggatatgaagttcgggcgatggagaaaaaggggattaaaacaatcatcggggaactgaacagagctattcgacagttcaaccagatgtttatttctctgaaagaatccattcagtggatgaagacagcttatgaagaaatgaaggtagaactggatcgcagacagaaccctacacttctggaaagcctgcaagattattatgataaaaagacacagggcagaccaccacttcccaatttctatgcggagatgaaacgaaaagggaagaatctctccaacttacaggagtttgcaaagtctatcaattatcttcagacacatcagatagagacaatggatgacttgaaggaacggattgatgaactgaacggtgttgtttctgtcggtaaaaaggaaatttccgaaaagcgagagcagttaaagaaattggaaaatctggaaaagatggcagaggtaataaagacaaaccagccattgattgatgagtataaccgtttctattttcagaaaagacgggagaaatattaccagcagcataagaaagaaatcaattactatcgcaaatgtgaacgggagctgaaacagcatctggataaaaatggaaaagttccaactgccagatggaaacgggaaaaagaagaactccggacagcgatcgaagagctgaaagcagataagcagccatatcaagatgagttggcttttgtgaaaaaagtacagacctgtgcagatattgccagacgtgaccgggaaatggcagaagcagatacttccgggcgttcagaagaaaaaagcgagaagcagacaaagttcccagcatttcacgcagctcagacggaagatatttttgaagaaagcggtaaagcagagcaacagccggtgaatcagcaggagaagaagccagaaaagaagacttctcttctgagaaaattggatgaaaagaagaaagagtgtgcagtgcgtgatgcaaaacaacaggcagtgaagaaaaaacggaaccatgagatgagtttatagcagtctgtcagcaggacagacaggaaaggatgataaaaatgcagtatacagaagaacagattgcaaaagcaaacaataccgatcttgtttctttcctgaacgcacagggagaacagttggtgaaaagtggcagagaataccgttggaaaaagcatgacagtgtaacgatatctggaaaccgatggtatcggcatagtcagagtaaaggaggttatccggtagattttgtgatggaattttattatgcaacattcccggaagcagtgaaaatgctgatcggggaagaaggcgaaggcaggcagaagtcctgccccgccccgtctaaagactttcgattaccggagaaaaatgaggataatgaaaaaatcatgaagtatctgacaaaaaaaagagagattgagaaaacactggtggaagattggattgacagaggtgatatttacgaagaaaaggagcatcataatgttatatttgtcggcagagatgcagatggtattccgagatatgcacactgccggggaactggtgaaataaaatatcgtggagatgtagcaggttctgataaagcttttggattttgccacagaggaacggataatcagttatttgtgtttgaagcagccattgacctgctttcttttatccaattatttccaaaagactggaagaaacgcagttacctgagtctgggtggcgtctccagtgtggcactaatgtcttttctttctgaacgccctcagattacttctgttttcctgtgcctggataatgaccaggcagggaatgaggcttgtgagaaactggcaggagaaatctcagaaggatacagtgtaattcgtctgaaaccatcgcgaaaagactggaatgaaatcctctgtgataaaaatactgacagaaagaaagcaatcgcagaaacaatcacaataaaagtaccagaagcagaagaactggtgccgatgttatgttatgaagatattaagcagaccagtgtggagtggttgtggtttccttatattccatttggaaaactgacaatcattcagggcaatccgggagaaggaaaaacttattttgcaatgatgctgacggcagcttgtaccaatcgaaagttatttcctaatatggaagatattgaaccgttcaatgtaatttatcagacagcagaggacggtatgggtgacactatcaagccaagactgatagaagcaggagcagatctgagccgggttatggtaattgatgatacggaagaagcattaaccctatctgatgatcgaattgaaaaagcagtcagacagaatcgagtgcggcttgtaatcattgatccggtacaggcatttattggagcagatgtggatatgaaccgggcaaatgaagtgcgtccggtgttccgaaaactgggaatgattgcagagaaaaccggatgtgccattgtgctgatcggacatctgaataaatcttctgggacgcagagcacgtatcgaggacttggttctattgatattatggcagcagtgcgaagcttgattttcatcgggaaagtaagaaaagatccaaccacaagggtattgattcatgaaaaaagctcgctagcgccaccaggggagacaatggcgtttaaactgggagacgaagatggttttcgatgggtgggagcctatgagatttccgcagatgaattgttagatgggaaagaaggaaaagcaacagaaacaaagctggagagaggggcaaagctgatcagggaactgcttgctgataaaaaagaaatttcaatcagggaattagatgaaaaagcaaaggaacagggaatttctgggaggaccatgcgtgatgtaagaagccggatgaagaatgagttggagtaccaagtaaatgaaaagcaggagaatagtattcgattaaaagaatgatgggtggcagagtcatcgaagcaaatacagatttttatagataccctatctgccacctgccgtctgccggtgcatgaatactttcaagtatcaggagtaagtaaaagtagattgacagataatatagaaaagcgtattataataataagaggtgggatttcccacataaatgcttgcgtaggaggtgttggtaatggaagcaatgaaagattatgttgcccatctggataacaaaaaaagaattacgctcagaggagctgcttatcagtattacaatgtaaaagaatacggaaatggctgcattattctggaacctcgggaactggcagtgccagagagtatttcagccagaactctggcagatatggatcgtgcagtaagtaactttaagaaaggcgatgtttctccggttattgacctgtcagatttttaaaaggaataagagatgaattttaatatacgaatgggaattcctgaaatgcaggaactttggttagatctgcaggagaaatatcgttccggtaatataaaaaagaaggaagaacagttgtataaaaaatggggaaaggctttaaagctgctatcggcagatccagggtatccaagtcttcaaacccatgaaatagagccattatccagacgttacggaatgaaagtgtggcaatcttatctggaaaataaaaccagtggcgcaatgagaatgtactgggtttatggaccagaccagaaagatattacaattatcggactggaaccacatccggaagataagaaaaatggcgcatacgaccgaatttcactgtcggatttgtagaacaaaactgaatatggaacaaaaatacaagcagttagtctatgaaaaataggttagctgcttttttcatgcagaaaaggaggtgcggtgtatgggatatgcacgtaaagatgtagagaaaacaaagaaaatagcaaagaaattcgtccgttatcaggaaggggcagagctttacagcattgggctgacgaaattccaggagctggcgaaagaagccaaagcagtgtataagattgacaaggttgctcttgtaaactgtgagatatttgaaaagtatctggagacattccggattgcgtagggaagaaaaaattgtggaaggacgaaaaacagggattgactttttgtcatacgaaaactataatgaagatgtggaggaataagaacagatatggcgaagacaggaagaccaaagtcggaaaatgtaaaaaagaaagtattgagtatccgggtggaagattctatgtataagcgtatctgcgattatgccggaaagcacaaaatgactgtgacagaagttgtcctgcagggactggaaagaattttgaacagacctgaataacatgaagtccttcctttattgaaggaggattttatatggcacagacacgaaaagatctgcgaggcagagtcttgcggaaaggtgaatcacagagacgttccgatgagaggtatgtatatacttatacagatccccttggaagacgtaagtatgtttatgcacaagaccttgtaacgcttcgagaaaaagaagcacagctcatgaaagatcagatggacggtctggatatttatgttgccggaaaggctacagtaaattttgtatttgaccgctacatgagtctcaaaaacaatctgaaaccaacgaccaagagtaattatctttatatgtatgaccgatttatccgggatacatttggaaagcggaatatagcagagattaagtattctgatgtggtgcagttctataatcatttgaccaagaagcaggaactgaagattaacacattggaaaccattcatacgttattacatccaacttttcaactggctgtgagggatgacattatcagaaaaaatcctacggatggagtcatggcagaattaaagaaaaacttaggcatgaagaccggtgtgagacatgcactgacaattccacagcagagagcatttatggaatatattgctacgcatccgatttattttcactggtggccgatttttacgatttttcttggaaccgggtgccggattggagaagttttagggcttcgatgggaagacattgattacgagaagcggattatcagcatcaatcataatctgacgtattatccggtaggagaagaccgggcatcggaaaatcacatttcgacgccgaaaacagaagccggaatgcgtacgattcccatgttggatacagtgaaagatgcttttgaaatgatctgggaagagcagaaagaaaatggctggacagatgcagagattgacggaatgacaggctttgttttctgtaaccgttatggaaatataatgaatgcccagtcagtcaatcgggcaatcaagagaatctcatctgcttataatgcaacagaagaaatagaggcaaaaaaagagcatcgggagccggtgctgttgccggatttttcagcgcacagcttgagacacacattctgtacaaggctttgtgaaagagaaaccaacctgaaaataatccagtcgatcatggggcataaggatatccagaccactatggatatctatgcagaagcgacagaggagaaaaaacaggaaacatttgaacatttggctgcaacaatggatgtattttaagaagggcttatgaacccttttatctgacaacagaaataaccaaatgacatcaaattgacaacagatatgatttgacaatgattcatcatgaatggtgatgaagagaagacaatttaatagaaatagcacagcgaagcatcacgaagggtaatgaagaaaaatcaaaaaaattccccacaatgaagaccctgaatgatgtaaataagaaaaatgatgtaaaatctaaggctactgaagaagtgaaagcagagcctgaaaagattgatttttctaaggtaaagattgagcctttgtttgaggaaatggtagactttgatacattcagcaagtcagatttccgtgcagtaaaggttaaagagtgtgttgcagtaccgaagtcaaagaaactgttacagttcactcttgatgacggaacaggcacagacagaaccattttaagcggtattcacgcttattacgagccggaagaactggttggaaagactcttatcgctatcacaaatcttccaccgagagctatgatgggcattgactcttgcggtatgctcctcagtgctattcacgaagaagaaggcgaagaaaagcttcatcttctgatggttgatgaccacattccggcaggtgcaaagctctattaagatgatgtaaagatgtaccgttttaccaaataaacggaacgtacttcatttgataaaaaactgaaaaaacagcgatttacatcaaacttacatcatttgatgcagaaatcggtgcaagcaagaaaaaatcgcataataagcagaatgaatgggcagtccttaatgggattgcccatttttagaagagagagaaatgtaaatcaccgattaggttttcattgcagtggttatggagaacagttataatggggataaaagaaaacgacaaatttgaagttatggaggaatgatagtgagttatattacaatggaaatatggactggaatatggatattagtgagattatttccaatggcacttattatttttgcaggtgttatgattatcgaagtgggtattgaatttatccagaagaagaaaattgaagttaagattttaaattggttatgtcaattcttatggattctaatagttgtatcaatattaaaaattacaggaattattggtggtagttttggaatatcctcaccacttgatagttatattagttttaaattatttgaggatggatttaatgcggcaactattttgaatatatgtctattcattccatatggatttttgccagtatttatttttaagaatatccacaagcattggtggaatggcgttatacttggagcagtattttcgattggtatagaatttttgcaaacatttattggaaggtttgcacagttagatgatgtgattatgggtggatgagaggagcccatttaccagacattgagaagttaatggaaatttgtgattatttggaaatgcctgtaggagagatgttaggagatcatagacatattaacgatttagacgaggttaagcatcttatggatgtatcgcttaaacagaaagcctatattgaaaatttagaggcggagcttaatgagtgtaaaatgttaaataatcagcttatgagcgatctggatgcagatgaggggcttgcagaaatttgtgtgaatgagtttattgcagataccataaaggctgtaaaagacgctggagtaaagaagattacggttgagttttgataaagaaaaagagccagcttttgcaggctggctccatccagaggattactcctctttaagattttgtagctcattgatgcgttgagctaatcccttaagtagctccagatccttatctgatagtgagatagatagcttaaataaatcgtatagagagggcttactctctaagatctttgagattaaagcaggatcagtagaaaacttttcctgtgagaaaatctctggatctcttaggagatccgtagcatctatccctagataagttgctacagtctcaatcctatccattctaggagtgttctttccagtacaccattgagaaactgtagaggagctgtagtggagatcgttgattagatcttgttgagttttaccttttaccgctaggtagtaggtaagtgctttagcaaatgtactcattgtttttacacctcctctcctttgagggataagttaattatacagtattacagagaaaaagtaaagtaaaacagagataaaactctgtaaaacagaaaattaggtattgacatctctgtaaaacaggattatattataattgttctctgagaaacagagagaacacagagggggtactcccctcatatatttttgctatcaatctctattaaacagagaatgatatacaataaaacagagataaaggaggtacaagctaatgaatttagcagagttaaaggaggcttataaagccaaaaagttagccttagacagtgcaaagaaagaggaggagaaatacaaggcactccttaaggatgcgatgttagaggctggagaaagtgattacacggatgaggctggataccgctttgagcgaattgtgcaggagcgtaagagcatggatgaggaaaagctcttagcagaactccatgagagaaaccttactagctgtatcacaactaaggaggttgtagatgaggatgcaactcttaaggcggtagaggctggagagttgccacaggaagtattagcagatgccttacaggtaacagaggtagtaatgcttaagctcacagctcctaaaaaggcaaaggctaaaaagtgataacgatctggaaaactccaatagtagccacagtagagcaggtacttaaggatcttaagctccagctctacggagcagggctacttagggagattaaaaacacaggatcggatcttatgtgtacttgcccttttcacgcaaacggtaaggagcataacccatcttgcggagtgctcctacagcaaaaggtaacaaaggataagacctatgaggctggtacagtgcattgctacacctgtggatacacagcggatctacctcagtttgtagcggatctgttagggctgagtagcccagtagagggctttaagtggctggtaaatcagtacaactaccagacggaggagagagagctcccagatctggatatgtacagaggatccacagctaaatcctcagtactggaggagagcttagtaaagcagtacacacagaacctcctacagagtgaggaggcgtgcaggtacttacataaaaggcggatagctaactgggtgctagaggcttatgagctggggtttgatccagaggataaaacagtacttttccctgtaaggggcatggatgggaaagtgatcttttacaagggcaggagcatagctggaaagcatttttataacgcaaaagaggtagataaaacctccgtagtgtttgggctctgggagatccttaacggatcttttagctggggtacatcggatcagatagaggaggtttggattacagagagtgagatagatgctctcagccttatctcttatggagtaccagcggtactgtagatactctggttaagctcaatggtatcaaaaataaaaggtaaggaggctcatgtgtgagggaattatggcaagaaaaggctctaccctcatagctaaggagcttaatgatgctggataccgtaacacggtagggaaaccgtggaaacctatggatatacctaaatttgtatatgattgtaaaaatgtaggtaccatgattataaacaaagaaagacacgattttgagagtaagcaaactataaaactccctaaggaggagtgggtatatgtagaaaacgctctccctccgatagtcacacaggaggagtgggatctaatctgtaagatccatgaggagagagtaatagccacaggatccgacaggagaggcaagaaaaccagcggatactcttttagtggtaagctggtatgtggtatctgtggggctccttactggaggaaacagagagtatctaaggatgagtactgggtatgcagtacaaagcagactaaaggcaggagaaccagaaaaagagatagcacgatggggaaagctggagagataaatcctttaggctgtgataatgaaaatatctcttataactccctcatggagataatgggggtagtatcagagcgattacaggcaaatacagacacaataaagcatgatatgataaattggcttactaagctcagaaaacagctcctagaggcaaatggagggcatacagaggcagatctacagcgtgagctctccagaaaaagtaagctactggatgcctacttagatgggatcctaaataaacaggaataccagaaaaaagcagaggagttagatgagaggatcatccagctcaaagcagaaacagaaaagaataaggctaactctggagatattgcagagatagataaggtacttgctaacatagatgaggaggtatccagatatgtagatggtaatgagaaattaaaagtagaatacctcttagagcacttagagcaggtacagatattcccagataaggttatagttatagtgccgatattgagcgaggggatagtagtagaaaaagctcagtatgtatctagggagaaatggcgctggtaaatctaccacattgaaaatgttgactggtatgatgaaaccaactgcaggaaagatttactttgatggaaaacttttagataggaaagatttatcaaaaataggagcgttaattgaaaatccgcctatttatgaaaatctttccgccagagagaatttgaaggtaagacaattattgcttagtacagatgaaaacagaattgatgaggtcttgcagattgtatcacttacaaacaccggaaagaagaaagcaggacagttttctttggggatgaagcaaagactaggcattgcaatggcattgcttggagaaccggaacttttgatattggatgaacctacgaatggattagatccaataggtatcgaggaattacgagagctgatccggtcttttccggaacagggaatcactgtaattctctccagtcatattctctcagaggtacagttacttgcagataaagtcgggattatttcaggtggaatcttaggatacgaaggagcattaaagcagggagataatcttgaagatttgtttatgaatgtggtaagaaaaaaccagaaagcaggtgaaatccatggttaatattataaaagcagaacatcaaaaagccaaaagaaccatgcgaaaaaagtttatctggggatttcctcttcttacatttgtcatggcatttatatttactcttgggatgacaaatgcttatgcagaaagtgtttggaactggtggtatacacttttgctgccggggatgattgctctattttgttatctttctgtggcgcaggagaaaaagataaaatactatcatttaatgactattcccacagacagaagaaaattgttgctggggaaaattatttatattgggtacatgattttgttttctaatgtgattgtgtttgcaggagcaacgcttggaggctttcttctaacgacacatgttccagttggaggagcgttgattgcagtattgtttctgacggtttctgagttatgggagattccggtagctttatttttaagtgaacgatttggaatgattgtaaacctgttcgtctgcctatttattaccgtcagcggtgtggtaatatcacaaaccagaatctggtatgtacttgtttctgcaatccctatgcgaatgatgtgcccgttgcttcatgttttaccaaatggacttgccgcagaagcagggaatcctcttttggatacgggagtcattgttccgggaatgtgtctctcaatcatctggtttgtttttgtaacggttctgtttttgaaatggtttgagagaagagaggtgaaataagatgattggaagatctcttaatgcagacttgcgaaagatgaaaggaacatctgtgattctggcacacttactgattccgattataaccagcgttatatttttaatatattactttttttcaccatggaatgaaaatatgaaagtgattgcattttatcaggcaataggagcaggacttccggtacttattggaatttttacagcaagtgtgatggaacaggaacaaaatgcaggtgattttcaaaatctgttgtctttaccggataaacctgcagcatttttatcgaaactgttgatgctactggttttgtgtctgtgctctatcctattgacagcaatcatattcggaattggatttggaagaatcgcatcaagcgatatcgaaatcatgaaaggatgtatatttgcagcattgctgctgtggggaagcagtgttccactttatctgtggcagctgattctggcttttcagtttggaaaaggggtatccattggagcagggattatatcaggactaattagtgcattgatgcttaccggacttggagattatgtgtggaaatatgtatttgtctgctggacgggtagagtaccatatacttatctgcaatctgtattgggaaaaactagtgtaggtgaatggttgtcattcataccaggttgcttaatatttacagggattagtatggtatactatttttggtgggtaaaccactgggaaggaaacagaatatcggaatagaatcgagggaaactatggcaaaaatactggcagttgatgatgaaccggcaattttggaaatgatagaaagcattttgaataaggatggacatctggttaccaaagtaagtaatccgctgaaacttaatatggaagaattacatcgttatgacctgattttacttgacattatgatgtctggaatggacggctttgaattatgcaaaagaatcagggcacttgtggattgtccgattttgtttcttacggcaaaaacggaggaaaacagtctggtaaacggactttctttaggagcagatgattatatttcaaagccatttggagtgatggaacttcgggcaaggatcaatgcacatcttagaagagagcacagggaacattctgtccggatggttttggggagggtctgtattcaaatatctcaaaagaaactattggttgatgataaggaacttcctcttacgaaagcggagtacgaaatctgtgaatttctggctaaaaacagaggacaggttttctcgaaggaacagatattggaagcggtctttggctttgacaatgagagtaatgacagtactataatcacgcatatcaaaaatataagagcaaaatttgcggattatgattatacaccgataaaaacagtctgggggattggatataaatgggaagagtaaagagaagcaatgcactcagcaggatttttatgagatatgtactggtcatgcttggatcattagttggtttggtgattgttgcttatctgctgctgtaccttttgattagtgtgggctgtatttatccggcaaattatgcagagcaaaagattaatgaagcatatgatacgattctacgtgcagataaagtgactgctgagatgattcccgcactttgtgattatgtaatcttttcagagaatggagagaaaataggtggagatctgtcagaacaatacgaacagatagcatggaatgttgcaaagtacggaaacgcatccgggaaatatttttataaagtaattgtaagggaaaatgaatatgttgtattgcaatatcgcctgacacctcaatatcattcagcttttttgagggagcattttataggaccacagaatgtgatgattattatgtctgtgattggagcggtagcgattatcatcattccgtccatacgttttggaaaaagaatcaaaaagcagatgcagcctgtattagacgcaatcggacaaataaaggatcaaaatctggaatatgagacatcctgttccggtatcaaagagtttgatgactgtttatcggcaatcgatgatatgcgagatgcattgcgagaatctttagaaaagcagtggaaaacagagcaggaaaagaaacaacagatgtctgctttggcgcatgatattaaaacacctcttacgattgtacggggaaatgcagaactactttcagagactgaactgaccacagaacagaagaataatatcacttatgttttgaacggcacaacacagatacaaagttatgtgaaacagttgatagatgtcacaaaatcatggaattgcagtgatgttacctatacaacggtgaggttagaagattttttcgcagatataaaggaacaggcactcggactggtagaaatctatcaccagaaaatagattggaaggcgggacaaagtgataaaaaggtaacgattgcttatgatccaatgttccgggccgtaatgaatatgattcagaatgcagtggagcatacaaaagaaaatggaatcatttatattgacgcaaaggagcaggatggccggctgacattcattgtggaggatagcggatcaggatttacaaaagaagcattattgcatggtacagagcagttttttatggatgacacaagtagaaatggcgaagcccattatgggatgggactattttttgcaaaaactgtggctgaaaaatatggtggaggtattaaactttcaaattctgaaaatacaggtggggcgagggtagaaatatttttcctgagtagtcaagaaacaagctaaatagaccgcaattaagctatgtaaaagaaattttacatgcttttatctaatatgaaaaagccttttgatagacattactactacgtttgcggaaaatgcgtggtatttcagaaacgcacttgtccgtgcaaactatacgaacctgcaaaaaggtattcacgaaacaacagagtatttggaagcgtttctcagaaatctgcttttggacgagaaaaatgagcttcataatcgaaaccttcatataagtggacttttgagcgaagagaaagtggacatttgggttacaaaagtggatattgagaatggaaaagtggacattcaagacaaaaaagtggatattgaaagtgtactttccgaaaaaggtagtgatttctcggtaaaaacgacgattcatatccatagactttttgaaaagtttggtttcgatgagatgtttggaagaagtgcagttatggaacttcttgggctgaaaggttcaggtgcttcaaaacttctttccaatttggtgcaggcagatattattgaaccggtatccggtcacggaaaaggaaaatataaattcaagaagtaatgtatagcttgtttgaagttttataagttttttcttgaggttgtttttcataaaattctctatggtgaaagtttttatttgcttgataatataatctatttcaagttcagcattatcatttatttgctgaaccttttctttattacttaaatcaaaaatcggagtccaagtatccggcattttcgcactgaatcttgcggacaatgataagcctttaggagcaaggctttaaaacacaagcagttagtctatgaaagtagggtagctgctttttcgtgtccccaaatatatcccgatagtcagcttttgtaaaaaagtaaatcaaatagaataaacagtatacaacagttgacaacagtactacactgttatatactgtttgcaacaggagggaatatatgaagattataatcaataacacatcgatggtaccaatttatgaacagatcatggagcagatcaaggcgcagattatctccggacaattaaaagaaaatgatatattgccatctgtgagaacgatggcaaaggagctgaagatcagtgcacttactgtgaagaaagcatatgacaatctggaagcagagggaatgactatcacagttcatggaaaaggaacgtatgtagcggcttcgaacacacagctgatggaagaagagcgcaggaaagaagttgaggcggatctggaagcggcgattcagaagggacggcgctgcggaatgaaaggggaagagatccgttcattgtttgaactcattatggaggatgaataaatatgttagaaatcaaaggagtaaagaaaagctacggagaatttcagttagactgttcgttaaatgtagaaaaaggaagaattaccggtctggttggagagaacggggccggcaaaagcactctgtttaaggcggtgctcggactcatttcatatgatgccggcgagataaagattctgggaaaaacacaggaagagttaagtgaaaaagagaaagaggagctgggagtcgtcctggcagaagccggattcaccggatatttgaaaggaaaagatgttgaagcagtccttgccagattgtatccaaagtttgaagcagaaaaattccatcagatgtgtgaagaatatcagattccgttgaataaattcataaaagagtactcaacaggaatgaaggcaaagctgaatctgatcattgcattgacacatcaggcagaattcctgatgctggacgagccgacagcagggcttgatgtcggagcgagggaagggatgctggatattttaagagagtatatggaagagaagccggagagaagtatcctgatcagctcacatatttcttcggatctggaacatctctgtgatgatatttatgtaatccacaaaggaaagattgtgctccacgaagagatagatacgattctggaaaaatatgcagtgttgaaagtcagtgaggaacagtatcaggcaatggataaaaggtatcttttaaaagagagaaaagagttttttggaatcgcctgtcttacgaacgagaagcagtattatatggaaaattatccggaaatcgtagtggagagtggatcactcgatcaggtgattcttatgttaacaggaggcgagagatgatgaaaggaatcagaggacttttggaaaaggattttcggttgtttcttcggcaaggtggcaatctttttctggtattagcagttgtagcaatattttttatactcacgggaaaaatgggagctgacttcattgcagtgtatattccatctgttatggcagtatattcaggtaatacgattagctacgatgaaaatgatcatggatacacatatttgttttctttacccgtaaataaaaaaatatatgtcagagaaaaatatattttatcttttattatgacagtatgtggatggtgcattggggcaatctgtgcaggaatagccacgcttataaatcctgaagaagtgttaaatttggaaatgctggcaatggagctgatcacattctttgtggttcaggcagttgcgggaattatgattgcgatccgactaaggtttgaaggagagaagggacgaatcgtgctgccgatcgcaattttaattatttttgcaatttgttatacaattggttcttttctgaaggctaacctggaattcaaagaaagcatttggaatgtgataggaggaacaggagatcttgaaattgcgattgcacttattgtgttaagtctgcttgtatggtatgcttcgtataagtatagtatgagagtgatgagaaagaaagagttttgagataggaattggcaaaaacgaaaaaacattaaccataaatatacttttgtaacagatagaatctttgaaaatgagtatccggagcagttttgccaaatgacatggcaagttatataaaatcgtgttacaatggcttttgtcaggctacctgggactatggaaaataatgagaaaatgagagaaaaacaggtagcatagaatctgcggacattaaataaaaaacaaaggaaagtggggggattttttgaatgcagagagcaaaacacgaatgacggaaggaagcatctccaggaaaatcatattttttgcgattccgctgtttataggaaatctgtttcaacagttgtataatacggcagactctctgattgttggcaattttcttggcagtaatgccctggcggcggtcagttcctcgggaaatctgatctttctgatggtcgggttcatcaacggaatcgcgctgggtgcaggcgttgttatcgcgaggtattatggggcgaaaaataaggaatatttacagaaagcgatccacacgacagtagcgtttgggctggcggcaggtcttgcattgacggcgatcgggatgtttctggcgccaaagattctggtgctgatgggaacaccgtcggaggtgcttccgcagtcgatcgaatatttccgtacttattttgcgggttcccttggatttgtcatgtacaatatttttgtcggaatcttacagtcggtcggtgacagccggcatccgctgatctatctgatcgtgtcctcgtgtatcaatgtggtgctggatattttctttatcgcaggccttggcatgggagtcggggcagcggcgctggcaacggcgatttcacagtttgccagtgcgattttctgtatgattcacctgatgcggacaaaagaagaatatcggttacagatcagcaagatcggttttgacgggctcatgatgaaacagatcattcagaatggtgtgccgtccggttttcagaactccgtgatctctatcgccaatgtttttgtacagaccaatatcaatgcttttggaaaaatggcgatggcaggctgcggttcttattcaaagattgagggatttgcgtttctgccggttacatgctttacgatggcgctgacaacctttgtcagtcagaatcttggtgcgaagcagtacgaccgtgcgaaaaaaggtgcgcggtttggcatcctgtgctccatagtgatcgcggaactgatcggtgttctgatctatgtggcggctccgacgctgatcgcggcatttaacggagatccggaggtgatacattatggtgtgatgcaggcgcggacgattgcgctgttctattttttgctggcgttttctcactgtatcgcagcagtccttcgcggctccggtcatgcagcagttcctatgatcgtcatgctctgtgtctggtgtctgttccgtgtcagctatattaccgttgctgtgcactacattccggatattcgtgtgatcttctgggcatacccgctgacctggagcatcagctcggtgattttcctgtatctgtttttacgtggaaaatgggtatatggattcgagaaaaaaagataaaacagatagttttatcacaggtactataattttcagaattgaggaagaatgttcgtatgctaaataaaaaagaattcttaaaatacgcatcaagattagcctttccgattatgatccagaatctgatcggaacactggtaaatatggcagatacagtgatgcttggatatgtgagtcagacggctatgtcggcatcctcccttgccaatcagtttacatttattcttttctgtttatactacggtatggcagcgggaacatcggttttatgtgcccagtactggggaaaaggtgataaaaagacagtagaaaagatacttggtctggcggaacgaatctcgctgattgtttctgctgtattctttgccgtctcctttgccatgccaactactattatgaagatttttaccaatagtccggagacgattgcttccggtggtgaatatctgagggtgatttccttttcgtttgtatttatgggattctctcaggtttttatgagtgcccttcgaagcatcgggaagatcatgctgccttctgttacgtatgtagtttctctttgcgtcaatgtaatctgtaatgccacttttatctttggtttgtttggacttccgaagcttggtgttaccggagttgctcttggtacggtgattgccagaatcgtagaggtagtgatctgtctcgtttactcgttacatagttccgatgtcagattccggataaaatacttctttgccaaagcaggtgttctgttccaggattttatgaagatcgcaacgccggctgtgattaatgatgttgtctggagcctggccacttcagcatttgcagcgatccttggtcatatcggcgatgatatggttgcggcaaatgcagttgctgttatggtggtaaatattggtgccatcgcctgtcgtggcttctccaatgcaactacgatcattgtcagtcaggagctgggcaaaaatggtgttgacacagccagagaatacggaaaacgcatgctcaggatcacaattgttgtcagcctgatcggatgtggtgttattctggcgattcgaccagtgatactgaatttctatcgtgacaaactgacagagacctccatctattatcttggtgtctttatcattatgacaacctggcgtcttatgggggaaagcatcaatacctgcctgatatgcggctgcttcagaggtggaggtgataccagatttgggatgatcacggatacgatatttatgtggcttgttgcagttccccttacctacctggcagcatatgtattcaagctgccgccgatctgggtatactttgtaatgaccctggatgagttcgagaaaatgccggtggtattcgttcattatatcagaggaaaatggcttacgaatattaccagagatttcgagtaatcaggggaacattggaatcattatataaaaggaacagtacaatgaaaacgggctgaatggcatttatgctattcagcccgttgtttatgtatcgttttaaaaaattttgtggaaccaggggcatgtttcaggaaaggatgttatccctgagctgcgatttattcgattctttcttcgtctgcacccgttggcttcttaaagtggccgacaattatttgtacaagaaccctgcctccgataaatgtaagaagaaggcctgccggaattcctatacaggccagaaggaacgttaaagggtcgtcgtcacctttcattttgtatttgcctcttggtgtcagataaacttcgacatttttttcttcgcctatgctgacttcccggtagtaggtacgtttccctgtatattttattccatccacttcatacgaaagcttcgtcacatactcgtcgtaatcgtcatattcgtcgtccgaattctttatgtcataatcgataacacgggctgtgaccgttcgaacatccgctgatttcttatattctatgctggatacaattctgttaacactccataaaaacacccctacaactgcaaacaggaataaaagacctattagtacctcacctataaagtgtcctgttttcctcgatttgtttttcgtacacaatccccctctcagcttacataatcctgtagtacaccgttatctatgattatattaccggaaaaacagaaaagctgcactatcacttgtgtcaggataatttttccgcgccatctgaaaatttatagagtcctatttatgaaataactaaaaatttcaataacttatcaaaaaaaattctattttttttcaagactcttgtgattataatgaattcatcagccgggaacgaagcaaatccggcaaaatcaccaaacaggaaaacaggaggaacaaaaatgaaaagaaaagcattagcagcaattatggcggcagctatggcattatccatggttggctgtggcggatccacatcagagtccacagactctacaaaaacaacagatacaacagaagcaacagattctgcagagtccacagattccactgcatcagcagacggaactgtagaaaacaaagacaaacctctgtgctggttcaaccgtcagccatccagcagtgctaccggcgaactggacaaagaagctctgaacttcaacgcagatacttattacgtaggtttcgacgcaaaccagggtgctgaactgcagggagagatggttctggattacatcaaagaaaatgcagacaccatcgacagaaacggtgacggcgtgatcggatacgttctggcaatcggtgatatcggacataacgattctatcgctcgtacacgtggcgttcgttctgcactgggaacaggtgtggaagcagacggcggagtagattccacaccggctggaacaaacgtagacggaaaagcaaaaatggtacaggatgcaactttggaagtaaatggaaaaacatatacgatccgtgaactggcttctcaggagatgaaaaactcagcaggtgcaacatgggatgctgcaacagccggtaatgctatcggaacatggacagcttcctttggtgatcagatcgatgttgtagtttccaacaacgatggtatgggaatgtcaatgtttaacgcatgggcaaaagacaacaaagttcctaccttcggttacgatgcaaacagtgatgctgtagcagctatcgctgaaggatatggcggaacaatttctcagcatgcagacgttcaggcttatctgacactgagagttctgcgtaacgcactggacggtgtagacatcgatacaggtatcggtacagctgatgaagcaggtaactgcctgacagaaggtgaagattacagatacagcgaagaagacagatcttactatgcattaaatattgcggtaacagctgataactacaacgacttcacagattccacaaaggtttatgacaaagttgctaaccagctggatgaaagcaagagcccatccaaaaaagtatggctggatatctacaatgcatctgataacttcctgagttctacataccagccactgctggagaactatgatgatctgctgaacctgaacgtagattacatcggtggagatggacagacagagtccaatatcaccaaccgtcttggaaacccaagcgagtatgatgctttcgcaattaacatggttaagaccgataatgcagcagcatacacatcacttctctccaaataattcagagacagaataaaagcgtaaattgatgaaattacagaggggtgtcagcaatgatacccttctttactaagaaaaggaagcacagttatgacagaagataagaacaaatatatcttatcgattaacggcatgagtaaatcattcggtagaaataaggttctgaaacatattagcatgaatgtcaaacctggaaccattatgggactgatgggtgaaaacggtgccggaaaatcgacaatgatgaaatgcctctttggaacctatcagaaagatgaaggaaccatcatactggacgggaaagaagtaaacttctccggtccaaaagacgcactggaaaacggagtggcaatggtacatcaggagttgaaccagtgtcttgaaagaagtgttgtagacaatatgttccttggaagatacccaaagaattccgttggggttgtcgacgaaggaagaatgaaaaaagaaacatcagatctgttcagaaaactgggaattacagttgatctgacacaaccaatgaagaaaatgtctgtatctcagagacagatgtgtgagatcgcaaaagcgatttcctatcattctaaagttatcgtactggatgagcctacctcttctctgacggcaccggaggttgaaaaactctttaagatgatgcgtcagttgaaggctcaggggatttctctgatttacatttcacataaaatggatgaaatatttgaaatctgtgatgaaatatccgtgctgcgagacggaagtctggttatgaccaagccgagcacagaaacagatatgaatgaactgatcgccgccatggttggacgttctctggataacagatttccacctgtagacaatacaccgggagaagtgattctctcggtacagaatatatcgacaaagtatgcaccaaagctgcagaacatttcttttgatatcaaaaaaggagaaatcttcggattctatggtctggttggtgccggtcgtaccgagcttcttgagacaatcttcggaattcgtacaagagcagaaggaaatatcgtatatgacggaaagatgctgaacttctcatctccgaaggatgctatggatcacggatttgctctgatcacagaggaaagaaaagccaatggcctgttcctgaaaggcgatattacattcaataccaccattgcgaatatgaatcattataagagtggaatcgcattatcacatgataagatggtacgtgcaacagctgaagaaatcaagatcatgcatacaaaatgtatgggaccggatgatatgatcgccaatctttccggtggtaatcagcagaaagccatctttggtaagtggctggagcgttcgccgagcgtattcatgatggatgatccgacacgaggaatcgatgttggagcaaaatatgaaatctatgaactgatcatcaatatggcaaaacagggaaaaacgatcatcgttgtttcttcagagatgccggaaattcttggtattaccaaccgaatcggtgttatgtctaacggacgcctggccggaatcgtaaatacgaaagagacaaaccaggaagaattattgagactcagtgctaaatatctgtaacaggagggaatttggaaatggcagaaaacagtgttattatttcggctgaagaagaagcaaaacttttgaaaccgatcaatgaatatgtggaaaagatccagaaaaaaatcgatatgttacgcgtagacggatctgataaagtgaatgatctgaaaaaccagatcgctatcgcaaaagaaaacaagaacttatccaaagtccagagggataagatcattgcaaacagtaaaaaagagctggaaagtgcgaaaagagtagaagcggccaacaaagaagaaatcaaaaagctgatcgcagaagctgaggactatctggccaaacattacaaaaaagattactacgatgtagtaaacaacagctgtaaagctgcaaaagcggaagaaaacaacagatatgaaaaaatcaaagcagatctgaagagcgagcatcagaaaaagatagcttctctgaaagatgcagaagagatcagggctgagaaatatgtgtttaaaaacaaattgtttgatgcacagatggctcatgaatcaaagatccaggagatcaaagacagaagacatgatgcatacatgcataaatatcatctgatcgatctgctgagaacttccaaattcaccttccttcagcagagagaacagaaactggaaaattacagatattccttcaatttgtcccagttcctgtacaaaaacggtctgtatatcgtaatcatcctgatcttcatcgcactgtgtattatcacacctgttgtgaaaaacacacagctgctgacagttaccaatatcctgaacatcttacagcaggcatccccgcgtatgttccttgcacttggtgttgccggtctgatcctgttgacaggtaccgatctttctgtaggacgtatggttggtatgggtatggttacagcaaccattatcatgcataacggaattaatacaggtgccgtattcggacatgtatttgatttctccacaatgccttccacagtgaaagcactgttcgcactgttaatgtgtgtgatctttacaactgtattttcaatgatcgccggattcttcatggcaagattcaagatgcatccgtttatctctacaatggctaacatgctgatcatcttcggtctggttacttatgctactaagggtgtatctttcggtgcaattgattctgcgatcccgaataccttcatcccgcagatcggcaaattcccgaccatcattctgtgggcagttgcagcagttatcattgtatggtttatctggaacaaaacaacatttggtaaaaacctgtatgcggtaggtggaaacccggaagctgcagcagtatctggtatctccgtattcaaagtaactatgggagcatttattctggcaggtatcctgtacggatttggttcctggctggaatgtaaccgtatggttggttccggtagtgcagcttatggacagggatgggatatggatgctatcgcagcctgcgtagttggtggtgtatcctttaccggtggtatcggtaagatctccggagtagtaaccggtgtattgatctttacctcccttacatactccctgacgattctgggtattgataccaaccttcagttcatctttgaaggtatcatcatcctggcagccgtaacacttgactgtctgaaatatgtacagaaaaaataataaaatatattgaaacagacagaatataagacagcccggtcatccgatggatgacatgggcggtcttttattctgttttggcaattttgtaactattcagagccatgcgaaatggaagaaaaatcgcgaatcatgtttacatgaatgagctatttttctgaaatttcatatggcgagaagcaacatcgagatgcagcgtaagcggaatcgagatggggatctgaatagttataaaatttttgtaactattcattcagcagagagcaatcttctgctataatgaaagaacaataatatgctccgcaaaacaggaggataaggatggaacaatataaagtgattcttgtcgatgatgaagtagaggtcatcgatgttatgaaaaaaaagatccgttgggatgatctgggatttgacgtagtgggaagcgccaccaacggcgtgaaggctttggagctggtggaaaagcttcagccggatgtggtactgacggacatcaaaatgccttacatggatggactggagctggcaagaaaactgaaccaggactatcccaatatctatattatgctttgcaccggctttgacgaatttgaatatgcgaaagaggctgtccatctggaaatcaaagaatatatgctgaaacccatcagcgccaccgagctgtcagaaagcctgatgaagctgaaaaccacactggacagggaaagggaagaaaagttaaatgtaaaaaaactggaagactatttccaggaggtattaccaaagctgcagtcaaatttctttatttccctgattgagggaagggtcagagaagaggactatgaacgattccttttagactatcgggtggatatgaagggacctttgttttgctgcatgatttttcatacctcggaaaatgatgtgccggatggcatgaatcccttattgttatccatgtccgtggagcgggagatcaaacagcggctgaccgagaattgcaactgccaggaattcatctatatgggtaatactattctgattatggaactccattcagaagatgaaatagctcaattgacggacaagtgtgaccggttctgccgctgggcatggagaattataggggcggcagttaccgcagggatcggaactgtctgcaacaatctgtacgatatcagtatttcctacgagggagccagagaggcggtgtcctaccgtgtcctgtacggaacaaaacgagccatcaatatcgcagagattgttcccaaagagtcgaaaaaggcggttcccttagaagaaacaaggatgcaggagctgtttcgagccatccatgtagggaatcaggagaagatccggaaagaagccatcaaagagacagaaaagctccataagaatgcagccaccatcagccagtacaatctggctaccatggagatcgtcagcggatttttcaagttttgtgccaataattccatggacttcaatgaaatctccggcaatgtacagaatctttatgaaagagtcacccagttcgatgaaaactccatgacaaactggattatcaatatgtctactgccatcagcgaaaaactgagaagcaccagaaacagtacctccaggcgtatcatcaccgatgcacagaacatcgtaaaagacagatatatggagccggatctctcactggatgatgtgtgtgcagatcttggtgtatcaaactcctacttttcctccagctttaaaaaggagactggccagtcctttgtctcctatcttaccgattatcggatggacagggcagaagagctggtgctgaacaccgatgaaaaaagctataagatcgcagaaaaagtcggatatcaggatgccaactacttcagttatgtattcaaaaaaaagttcggtgtttctccttccaaatacagagcttccgggaaacaacaaagcgaaaagcagaaagagtgaagacataaaaaaggtacgaaatatatagagacaagggaatagatgaagaggaacatgtatgaaatataggaaaagagggttggattcccggaaaaatatcgtatttaacatacagtcgatcattctgtctgtccttatggcgatttcgctggttacgatcattgtcatgggattgttgctttaccatcgattcaagctggcattggaaaagacagcagtggacaacacggaagctaccgtggaggctaccgtggaccggttaaatgcagacctgctggatatccgccagatcctcaatggggcaaactataacgtagtccagcagtttgatatatccagccgggaattctcggagcaattcagtctgctctatgagaccaactctgataagattcagagtgtggcgctgtatgatcaaaaaggaaatctgatcgcatcggagccggtggcagcagaaaagaaaaatgtaagggtacagacgcaggaatggtttaaaaatgcggaagatgtcattgaaaatatacacttttccacaccgcatatccaggaactgtttgaggatggatcctatcggtatcaatgggtagtttccctgagcaggtatgtagatgttaacaagggagagataccggaaaccggtatccttttgctggatatgaaatattctgtgatcagggacgtaatgaaacagatcaatgattgctccggcggaatctactattatctgatcagtcaggacggagagatgatctatcatccaaggggaacggaattaaaccgcggattatttgaagaaaatagcctggaagcggaaaaatatgaggacggaacctatgagatccgttctaacggtcagaatgagaccgtgatcgttggaagcatagcctatacaggatggaagatgatcggtgttgtgccggagagtgtgcaggcggcaaattataagaattttcgctactatgtatttgccaccattttggtacttctggtcatgctcttggagggaaaccagctggtatcccgaaagatatccaagcctatccgggagctggatgcttctgtcaagacctatgaggcaggaggaaagccggatatctatatcggcggctcatccgagatccgccatctgggacattcggtacagaagtcttatgagcagatcgaagaactgatggatgagatcatccaacagcaaaatgaacgaagaaaaagcgaactggacgccctgcaaagccagatcaatccacattttctgtacaatacactggagtcgattacgtggatggtggaagcccaggaaaatgaagcagcggttcgcatgatctctgaactggcaaaattacttcgtgtcagcctgtcccggggcaagaccatcattcccatcaaggatgaactgcagcatagcagaagctatatgaatatccagctggccaggtataaagagcggttcaaaacagaattccggattgataaagagatcgaaaattactgcatcgttaagttggtgattcagcccatcctggagaatgccatttattatggtgtcggcaacatggatgaggatgatgacggtatgatcattgtcaccggagaaaagagggacgaggacatcctgatcactatcgaagacaatggcatgggcatgcgggaagaggttttggaaaatattctgacggatagcagcaaggttccgaagcatggctccggtgtgggtgtgatcaatgtacattctagaatccggttgatgtttggggaagaatatggacttttcatagaaagcgaaccggacgaaggaacaaaagtcacgatccgtatccctgcaattccatacacgccggaaaatgcagaaacactggaattacaaaaatatatacagaggagacaggcagatgaaaaagactagaataaaatttcttatgattgagtttcttttgctgatgctggcagtattctttgtatggaagattttcgatcagaacgtagcagagaccaggatcgccgtgattcttccggaatccggtgacaaacgctgggatgccctgatcaatggtatgaaacagtctgcagcagagaacaacgtccatatgatcatctgtaacacggaagagatcgacggaccggaggtggaaagggaatttatcagagaacagaaggacaacgacatcgatggctttattatatatcccgcacccggtcatgagaccgaaaatatgctgaaaaaagaatgtggaaataaaccctatttactgatcgcagacagtctggcggtaaaagaaggagaaactgcaagtcccacgatccagccggattatcgggaaatcggaagacggctgggagaacagctgaaaacaaaaaagcagaagatcggaatcatagccgactggaaaatgtccgaggctgtacaggcagagatcagtggattgactgaggcactggaaggcagcggaagtgagatcagttggtgtatttaccggagaaaagagcagaacattacggagcggatgaaggaggaaacaaaggcggatgcccttgtcatactggatcccggggtactggaagagttcggagaacaggcagaacatgggaaatacaagggtgcggaactctatggagtaggttacagtctgaagacagtcgcgcttttggataaaggaaacatccagggccttgttgtgccggacggatatgagatcggctataaaagtgtgaaagaaatagccggaaagatagaacataagttttataaaatgaaaggttacacaacagaataccagatattcagtaagaaagatttctctatggatgatgatttagaaaggtttttatattcctatgaataaaaagaaaagaaggctggcagtagtattagctactgttacagggagtgcggtgctcgtgctgtccgggtgttccggaaagtcagaacagacagagaaaactctgcgggtcggagtgataacctacagtcaggatgatccctttatcaatggactgaccgaggagctgaaggtacagctgaaagccatggaaaacaagcagcgacggattatcgtatcaacaaaaagtggaaatgacgatcaacaggaacagaatgaaaaggtagaagagatgatcgatgcaggctgtgatgtgctctgtatcaatcttgtggatcggacagctccgtccaggatcgtcaggatggcaagaaacgaagatattccggtgatcttctttaaccgggaaccggtgagggaagacctgatgcagtgggaaaagctgtattatgtgggctgcgatgcagaacagtccgggattatgcagggggagatcgcagcagaatacatcaacagccatccggaagtagataaaaacgaggacggaaagattcaatacgtgcttctggaaggagaagcaggtcatcaggatgccatcagcagaacggagtattccgtaaagacattgatgaagaatgatgttatactggaaaagctaagttatcagttagcggactggaaccgtggacaggcggagaaccgtatgaaccgtctgatcagccagtacggaaaagagatcgaacttgtcatatctaacaacgatgagatggcactgggggctgtggaagcttatcggacagtagattatgcccgtgaagactggccggtgatcttcggaatcgatggtctggaagatgcactgaaagccgtaaaggcaggagagatgcagggcagcatcctcaatgacagagtagatcaggcgaaggaaatggcaaaaatggcggtgaaactgttcgagggagaggattttgatcaggaaaacctgaaagaaggccggtattatttttcagaatatcagaaggtagacagcagcaatatagatgaatatctgagtgcaggagaagcaattgcccactcagaaatgtaagcgggaagactgcatatacagacagaaagaaaaagtggatgatgcatatccacttcacagaatgaggaagaaacagatggaacatacatggaccaaagaattttatcaggaaacagatctggcgaaacggcagcagattttaaaggaacatatcggagaggaggaagcctgggaagaagaatacagaactcggctctggacagctcgatacggacagcgcaggctccagaaggatgagtttgtcagatgtctgatggaactgaaatatctggcggaaggaacctctctggatcccggtggcgacagaaggaagatgggagccaggatcctctccacgttatgcctggcagaagccatgcagtcagagaagggataccagaagattcttgaggatgaactgtacaatgtattcctgaaatttattcaggtcagcagagggggcagaggatttacctctctggtattcggcatgggtcagttatctgaagaaggaatcgcaaaaaagatcgccgaacagatcagcgcgatcgctttcagggcgccccgcctgcttcgtatggaaaaagaattcaccctgctccgggaagccgccctccgggcatatcggcaggagtatccgaacagagagcattttttgaacaaatagtaacgagatgagtattcagtgttttcgggcaaggggatcgggttacgtttccggtaaaaaggaaagcgcgtatgcaagagagtcgttgagatgagatttcatcatctcgacggctttttcgattcgtaataaccgggtggctgatcggcgggattggttaccagataggaaaaatctaccggaaatcatgacaattttaccagaaaatataacagctattaaatctcttagaacaggtgaaatctcaatcgaaatttaagtaacagactgtatagatgaaaaggggagttttttacagcccctttttccattaaaaagtgtgggaaatgtctagaagatcaaaattaataccaaaaaatgaataattttaaaaaagtgggaatagaataatgacagaaggcacagagtgtgataatatcagtctataaaatatattaccgaaaaataaaaataattctaaaagtgggaataggagatagtagcatgcagcttatcgtaagaaaagagtatttaaacgaactgattgaattgtatgggacaccggatataaaagtaattacgggcatcagacgaagcggtaaatcagtattgctgcaagagtttgtctcttatctgcagtcattagaggaagcggtaaatattgttatgataaaccttcaggaattagagtttgatcatttgttggagtatcatgcattgcataagtacatcctggatcagtacaaagagggaatgacgaatgttttactgattgatgaggttcagctatgcccgcagtttgaacttgcaattaatagtatttatacaaaaggaatttatgatatttatattaccggttcaaacgcatttttgttaagttcagatttagcaacactttttaccggaagaacgatggaaataaaagtatatccattttctttcgtggaatatctaacttattatggaattacagatagatatgatgaagcttttgatcagtatgtccgaactggtggtatgcctggcgcttatgtgtataagactgaggacagacagtatgattacgttagggatgtatattcaaccattcttatcagagatttggttgaaaagtataagataagaaataaatcagagttcactaacatatctgaattcatgatggataacatcggtaatttactttcgcctaataatatcagcaaaactttaaaaaatgaccagagtgagataaccagaaagacggtgtcaaaatacattggttatttagaaaatgcctttctgttctatgaggcaaaacggtatgatttaaaagggaaaaaatatctggcaaataatagtaaatattatctttgtgatacatcatttcgttatgcagtcaatggtacacgaaacatggactttggaagagtttacgaaaatattgtttatctggagttgcgtagaagaggatatgaggtatatgtgggaaaactctataaaaaggaagtggattttgtagctaagaaacgtgaggctcaaatatatattcaggtaagcgacaatatttcagatgaaaaaacatttgaaagagaatattcgcctttgcttgcaataagagatgcatatcctaagatgataattgcaagaacacatcatgaaacttatgattataaaggagtgcaagtggttgatatctgtagatggttacgagaatagtaccaattactgagcacattaacaatgtacaatttgactgaacttagtgattatgaattcctatggagaacagatagagaagcaggttttatgtacagcattctctgctacatgtgaaaagagaaagtctatttttagtaaggatgatatagaaactacattacatttggtatctaatgatttacatatggcagagctttgggggcagtttcaaaaaagcaattatccagaaattttccagacagcgtctggaaaatctgtgagtttattatcatggtcgcattatgcagtgttactacaagttaaagataaagaagcccgtgactggtatgaaaaggaagcggcagagcagacctggagtgttagaactttacaacggaatattttatcccagtattactatcgtatgctcaaaacgcagaaggcaatgttttatcttcaacagcaggaaacagagctttgaacagtctgcgaacagccagagagaacctgaacagtgcaaagaactggggactggttgatatgtttggtggtggattttttactacgatgctgaaacattccaagatggatcaggcaaagcagaacatggagcaggcaaaatacgatcttcgcaatttcagtaaggaattgaatgatgttaatctggcatgtgatctgcatatggataccggcgactttctttcttttgcggattatttttttgatgggttcgtagtggactgtatagtacaggaccggatcaatacggcaagacgccaggtggatgaggcgatccggagaacagaatacataataaatcaattacagcatatgtagaaaggcaacaggcagcgagccactgaacttacaggtttggtggctcgctgtctttggatcttgtaagtctgcatgctgtatacgtattttttgtatgtattttattatactggaatcatgaaaaacaaacaataatcagtagaaagagagaatgaaataaactctgtattttcctcggtatatgttcggcttaatcacataatcgggagaacggcaaaattatgcggttcatatgtgttactttatgataaaatagtatgaaacatgtttagagcgtgtttgaaaaatcattcctgcaatctgcacgccccactttgcggcatattttaccttcattcggttgacgtagcccactacgccgccctcattcaggcaacatctcccacaaactgtgacgcacatcttgcagaaagcctttttcaaacacgctctagcatccagattgacaggcatgagcattgaaaaatataaaaccatgtgtggaaggagtttttagtgatatatttaagcagtttcaggttaagtaatgaacaagtaaaaaatcctaacatatatccttatcatgtgtttcgaggaaaagacatagagccttttgtattttctccgatcacggtgctgtacggcaataatggatcggggaaatcgacgatattaaatatcatggcaaacaagctcatggtaaagggcagagaatatgctaccagtaattctttcggaattgtagattattgtggtaaattttcggcagaatgttgttttagctacggagaggatgagtttggcaataccatcagaaagattcctgaaaacagcagattcatcaaaagcgaagacatcttatatgagatcaagaaaattcagcagaagcagattctggcggatggaatggaatatgattatatgaaaaacggacattcccgtaaagaggcagaagagtattttcagacacgggagggaagacgtcagctggaatatattacatttgcgcaggaaaaatattcgaatggagaaacagcaatgcaattctttgaagactacctgttgccggatgctttgtatctgttggacgaaccggaggtgtcattgtcgcccgcgaatcaggtattgctggcagaagaaattaataaaatggcgagattcctctcctgccagtttgttattgccacacattcaccgtttatgcttggaacgctggatgcaaagatttataatatagacacagacgattaccgatgttgtgaatggtgcgaactggaaaatgtgcggtatttttatgagtttttcaagaaacatgagaaagagtttgaggagtagcaaaatggtaaaacaaattgtaagagatattttctttttaggacagccctcggagccggcaacgcaggcggatctttcggttggaagagatctgctggataccttgcaggcgaatcgggaggcctgtgtgggcatggcggcaaatatgatcggtgtgaagaaaaatattattatcgtgaacatgggcttgatcgatgtggtgatgtttaatccggtgatcatttccagacggggaagatatgagacggaggaaggatgtctgtccctggaaggagttcgcaagacaaccagatatcaggaaatcgaagtggaatactatgattccagctggaaaaagcaacgacagaaactgtccggatggacagctcagatcgcgcagcatgagatcgatcatttatcgggaaagatcatttagcaaaattatggcaatgcggccgtcacaatctacgggtcccggagtgcgtttaccggtaaggaaagaaggctttgcaggcggaggaaaggaagacaacgatgaatcagaacgaaacacaatgggataaactgctgaagatcaggacaaccggccgggatgattcgcacgcagaccagcaccggtatccgtatgagccgacaccgtattgtgtgctggagaggctggcgaacagcgggatgatcgggaagcaaaatacggtactggattatgggacagggaaagggcgcgtctgtttttatctgtcctatcagaccaggtgccggtcagtgggaatcgaatacgatgagcggattttttcgggagccatggaaaaccgggagatggcagtatccggtgcacgtacctgctttgtgaaagcagatgcgggagagtattcggtaccgaaagaagttgaccggtgttacttttttaacccattttcaatagaaatcttacagaaggttctcgcgaggatctacgaatccttttatgaacatccgagagaaatacagttgcttttttattatccggcggatgcttatgtcagttatcttatgacggaagaacagctgatgttctcagatgagatagattgtatggatctgtttgagggagaaaatccgagagaaaagattcttgtgtttgagattgtatagaaaaaatacactttctggatattgtaataaacacaagaaaagcagattgctataggcaaggagtacatgttatactgattttgcgggaagtcagaacacttcaaggcggcctaccctcttcggaggggcaaccctccagacgaaagaaaggagggttgttaatgtatgttacatattcggatctgatccagataggtatcttcattgtcactctcataggattgtgctatacaatctttgggagaaaaaaatagccgcccactactgcaatagtgaacggctggtaaataaaacagttctttaagctatcaagggtaggtcgtgtgtcgttgacttccccttcttatatatataatatagcacatctgacaacgggtggcaagcaaagaagaatttttacggagaacattctttgtggcatctgacactgatgaaaagctttaaggttatcaaagcatgttatgcatgcctgcactggtgtccgaaacacgctacattgctgcgtgtgccatttttaactcatcggccccagtatcatcatccggaggttacggtgtcgagtatgaaaaatccttccagccttgttatttgataacagattcattataatgaatttgtttcagcagttatataatacggccgattccctgatcggagcgtttaatggcgatccggaggtggtgcattttggagtgatgcaggcgagaaccatcgcgctgttctattttttgctggcgttttctcattgtatcgcagcggtacttcggggatccggcaatgcatcgattccgatgatcgtcatgctttgcgtctggtgtctgttccgggtaagttatattaccgtcggtgttcattttattccagatatccgcgtggtattccgggcgtacccgctgacctggagcatcagttccggcattttcctgtatctgtttttgcgggggaaatgggtgtatgggtttgaaaaaagaaaaaataggatattaaaaagttttcggtaaaaaccggagggcataattcagggagtcgttcagatgtgttttcatcatctggacggctttttcaatatcgccatctttgtaagcctgaaaaatagccagatgttcctcatcgatccgagtctggatcacggtttcccggcagtactggttggaaaaaatagaaatcccgcttcggagccgttcggcggactctgcaagtctggagttgttgcagtaacggtaaaaaacgagatggaattcgtcggaataccggttccaggtttgcacatcagcggctttggcagctgcacattccttttccagaatctctgtgacctctgcctgtaatttttcctgatccggagaggcagaagcataacggatcgccagcccgtcaagatcccccataaaagtatagatttcccggagatcatcggcagtaaagctgatcacccggatgcctacattagaataataagaaaccagctgatcctgggtcagccgggtcagagcttcccggatcggggtagaacttacctgaaagcgttcctggagaagcttcaaggtgagcttttctccacatggtatcttttgtgtcaaaatatcatttctcaaaatctgataaatctgttctgataaagttgatttatttaatcccatcaataaaatctcctgttattgttattgttattgttattgttattgttattgttattgttattgttgttgttgcgataaccactggggctttccagaggcattgtgcgcgggtattatgtgaaatattttaacatagcacataactgtcaagcaagaggctgcatgcagacagatgtatgccagaactttttttattctctcacgaactgcgatgtacattttgcagaaattttttgaaatatgctctgatcatcggattcatgcagcgtagaattggtgtaaataacataaatctgtagaagaagtgttgcttttttgtgttttatgcccataaagtgtgcctttctcattgacactaacgcgttgaagtgttatagtctgatttaacatatgacattttgcaaaatgcaaaatacagtaaagatgaatggttgatcagaagatacgaaagatgatgatacaggtatcacagagtcagcaaagaagggatgaaaggaaggacgatagaagatggcagaatataactggccttatccggatgagttcggacagacggaaacagtagattccgatattctggttttaggtggaggacttgcaggatgttttgcggcgatcgcggcagcaagaaaagggaaaaaagtagtactggtagagaaaggggcaaccaagagaagcggagcggcaggaacaggatttgaccactgggagtcagcctgtaccaatccgtgttctcaggtgacaccggaagaaattgccaatgcttatgtggatgagcaggatcactacagcaacggtatcgcacattatattgagtgcagagaagggtatgaccgtatgctggatctggaaagtttcggtggcaagatccgtgatacggaagatgagtttaagggtgcggaattccgggatgatgagacgaagctgatgtttgcttatgattataagaaccgttttacgttgcgtgtctggggttctacgttcaaaccggcgctttatgaagaactgaaacgtctcggtgtcacgatttatgacagaacagaagcaaccgcacttcttacaaccatagaaaatggaaagaaacggggcatcggtgccatcggtatgaacgtacacaccggaaaactgttggtattccgggcaaaagctactttgctgacgatgtccagaccggcccgcgtgtggttatttaatccggatcttaccggactttgcgaattccggccgatgcagtcgatcggaagcggacatgcgatgggatggagagccggtatggagtttaccatgatggaaaaatcggtgaaaggtgaattctccgcagccggacgaagcttccctccttacggaacaggaaacaatcataatacctggtatgcagcgacgatggtggatgccagaggcgtggaaattccgtatctggatcgtgacggcaatgtgctgaagactgtatctgagcgttattatccggtaaagggtcagaagtttttcttaaaaggcggcgtgatcgatgaaccgaagtacgagtaccgcggaccggagacgatgccttttgacgaactgatcaagaggggatataaactgccgttttatgcggatctgagcagaatgccggagatggagcggaaagtcatctggggcatgatggttggagaggaaggaaagaccaagattccaatccttcaatattatacagaacgtggatttgatccggagaaacatatgctgcaaagctatggcaatggctggcagtccgcagccttcctggatcaggagagacagctgttcggggcgccgggcggaattatgcatgactgggatctgaagaccaatattgacggtatctatgcggccggcgatcagctgtttgcatccgactgtgccggatttgcatgttccacaggatactatgcgggaagaaaagcggcagattacagtgatacgatcgaagaactggctgagatcgaccaggcagaagtggatgcggagagagaacgtctgtatgcaccgatgaaccgtacagaaggcgtcacctggaaagaactgaatatggcgatctccaaggcgatgcagaattattgcggtggcgtgaagaatgatgatcttctgatccagggaatcgatctgctgaagtcttacagagaagagatcgttccgcagctgtactgtaacaacccgcatgaactgatgcgtacccatgaggtgctggacattctggatgtttccgagatgatccttcaggcctgtctgatgcgaaaatccagttccaaacagctgtgtttctatcgaagcgattatccgcagatggatccgaaagaagaccactgcttcatcacgatccgccaggaaaatggcgttccggtacggggaaccgttccgggggattatttcggtgatttgaaaacagagtatgagaagagaaaccaggattatatcggaggtgaggcaagatgagtaagatgaaagttgaagtgattccgtgcagtgccacaccactgatctacgatgaagaaaaatgtatcggctgcaacgcctgtgcagagatctgccagtgcgatattattctgccaaatccggaaaaagggaaacctccgatcgtgatgtttccgggagaatgttattactgtggagcctgcgtgatggtatgtccgaaaaaaggcgcactccgtctgcagcatccggtgatgaaccgtgcaaaattcgtcccggtaaagcccggaaccagaaaattagaaggggattgaaaatgttctttgcaaaatgagccatgcagatcaatcgatgatccgatggattgactttgcgttttgaaacagaattttaaaagagaaagatcaaaagaacggcccggaatgctggcaggaatccaacagaggctcagattccgggcagaaccaggaggaaaaacgtggaaacaaatacaaaaaagaagatcggtcttctgggctgtatcggaacgggaatcggtgcgatcatcggttccggaattttcggttcactgcccacagtgatcaatgatattggaaccggaattgtactggcactgctggcgacgattgtatacaccttagccaagacgattccaaatgtttatctgtcatcggtaacaccggcatcgggaagcttttttatcgcaccgacaaaactgatccatccggcggttggagtgtttatggcggcacagaatctgctacagccggtactgatctctgtgtttgcggtattgtttggcgattattttgtggcgctgttcccggcgctggaaggatataaaacgctgatcagcattgtgattctgctgatctatacgggaatcgcatggcagggcaatcatacctttgcgtttgtcaataatatcatggtagtagtattgatggtggctatgggctgttatatttttgtcggtatgccaagcattgatacctccagactgacactgggcgaaatcttcaatccgggcgtgaaactgaccagctttgcggcagcagtcggtgtgctggtatcttcgctgtccggtggaagcgcggtttcccagatcgcagatgatgtaaagaatccgaaccggaacattccactggcattactcctgtccccaacgattgttgcatttatctatatcggtatgggtattgttaccatcggctgcatgccggcaggagaactgaccacactttcagaggtgggaaaaatattcctgccttccggtcttctgacattttttatcgtaggaggtccgctgttcggtgttctgacttcaatggttccggttattatgttaacctgcgcccagattcaggcggcggcagataatgatctgtttccggcttttgtcggaaagaaaaataagaatggagtatcaccggtgattctttgcttcgttatgctcttttctatctgctgtgtggcgaccggatccagttttggagtgttaatgactgtattttctttcgtcaatgcactgtcggatatcgctctttgtctggtaccgttcttcctgaaaaagaaatatccgcatgcctgcaatcattctaccttcaagatggccatcggtctggtatatgcactgtcagcctttgcgtttgtagtcgcagcctatctggcatatgcgatgatcagtacgctgggaatgaccgtatggctgatgatccttggtgcaattgtactgtttgtgatctatattctgatccgtatctcttatctgaagaaacacggccgggatctgatcgcagaactgaaacaaccatatgagccatgggaagcccgcgagcgtgagtgcaaagcgatggatgaggcaaaataatacgtggaagccttgacagaaacgggcaggaaacgtatggataaatgaataagaaaccggtctggaaaaggaccggtgttgcgatagcgtacggagtgatatccgtacgctgttgtcgtatctgggggatttttacggttttaagtttaaaagtgtaaagtgtgaaggttaccgggatacggatatggagaaaataaaaacagcgaagtttctctggaagaactgtaccggagatcggatatcatcacccttcatatgccgctgattccggagacgagatatatgatcaacaaggaaagtatccatatgatgaaagacggcgtgattctgatcaactgtgcgagaggatcgcttgccggtctggacgcgctgatcgcgggcatcgaggggattctggatatggcagagcatgaaaagggacagtgggaggtttgtgcgaaataaaacaggtatcggatcgacgtggaatatggtatactggaaaaagatgctgaaatcgtatgtgcaacataagttcacacagaaaggacagatatggaaaaagcaagaacagatgcattatattacgcgttgaaagaaaaaggctaccccgatgatttctgccgggagatcgcatataagcagatgaatacggattataccgcaacaaggatgctgggatatctgtaccgcgtatcgaacccacgcccggaagatgtggtggatgagatgctggcaatcttaagtgaccggaacgcgatcattcagaaaaaagaactggaacatgcacaggcaacgatcaaccggatctacagagaggggctgtaacagtcagaatatggacaaaagaaaaattgcagtaaatacaggatgtgtctgtcttataattctgtttatcttcggcttttatcaattgatccagtgggataatacgagcagaagagggcaggaagaagcaaaaaaacagaaggaacttgacgaggcagaggcggaagagaaggcgtatgagcgggcaaaagaatatatggaaaattaccggatcagcctgcaggaaagtatgcaggctgctggaattgaggatatcagagtatcttatgagcaatacaatcagagcacgtattccagcgtttacaattactgggacgatgattctgactatcagtatttttattatgaactgagttattactgtgactcgatagattctatatttgaagaagctacgcaagatggaaattatgattcttttatagaactgatggaacgggagtgcaagatcaaagatcagcggccggtggaagtggatgggttttataaaatatttgttggagatagaaaatacgccgtaaagatcaatgaaagagatccggaaggagaactgacaatttcccgggagtatggagtgtattacagactggtgcagggagaagacgggtatgagctttatacgaacagaggaaagatttatccgaaagaagacatggaagaggataatgaatcgaaaaacaatgccggttcgaacagcaattcaggcagtactaacagttccggaagttcctatgggcatgccggcggatacggttcaggcagcttttacggaaatgccagtggatccggttctggcagcacttccgggcattccagtggttccggttctctgaaaaagacagatccctacgatgtggatgattacgatgatcccgatgattttgcggaagaatgggcagaagattttggagatggggattatgatgacggatacgatgatgcttatgattactgggaagaagagtatgatgattaatcgaaatacataatttgtgatattgtgcgtataaatataagtatataataggtagataaaaaaataagctggggtaacagcgtgctccaggagagtaagcagtcctgtgatggggctgcttttttctgcttaaagataaaaaaatgaaaaaaaatatcaataaaaaatctaactgatgaattttttcaatagtcctttgcattgttgacaggaaaaaatttccttgttattatgctgatactatagttagaatgtgctaacgagaaatagttaacaaggagaggaaaagatgaaaaagacatggaaaaaagtcgtatcactgcttatgtccgtcatggttgttttctctatgatgggagttcctgttatggcagaagaagcaaaagcagcgccgacagaggtggcttcctgtacagccagcggactctggacgacagtcctgaactttgcattcaaggacactgcctggatgaatgcgatcaacagtgtgaccgtcaatggtacagtgtatacgaacaaaacgatcagcagctttggaagtgataccaatatctgggatataggaagtgcaacaggagcttatggaagctacacagcgcttagaattgtcagtccggatacctatccactgactgttgatatcacagcagccggttatcagaagctgaccatgcaggtgacaaaaacaactgtaagctatcaggatgtttatacagcaaccgtagtaccgcagcagccggtagaaaagacttacaaagcaactgcagcagctgcaacacacggcaaagttactctgagcaagagcgaaggcatcaaagaaggcgagacagtaactgcaaccgcaacaccggacgagggatatgaactggatacccttaccgttgccgctgcagacagcaaagcagtagcaacacaggctaccaaaacaggctgtacatttgccatgcctgcttctgatgtgacagttactgcaaccttcaaagaagaagcaccgaaaacgatcgatctgagccaggtaagcatcgcaacagatacattcggaaatgactgggaagtaacttttaaagatgcgaacggctatgtaaaagcgatcacagaagtgaaagtaaacggaacaacatgggaagaaaaatcctacagtatttcttccggtggtgcatataagaaacatacagacgataacaaactggtatttgcagcaaaagattacagctctgcaccggtgatcccggtattaaagagcggtgatgtgatcaccatttccgcaaaaggttatgaagattttaaagcaaaactggttatcgaccttgacggaaaagcatctctggtagcagatgacggaaagggagatccttatgaactgcatgtaaagatcgaaggtactttcgattctgccctggtaggacaggacaattacgatgcagtatccagcgccagtgtcggtggcgcttccagcaacaaaaacagtgatgtaacggtatacggagcaatgctggaaaaaggcaaagaaccgaccgacagcgactggaaagaactggacaatatgtcccagatcaaactggacggtaaaaaatgcagcgtaagtatcgtaccggatactgcaagcggaacaccggctgacagcgacagcggaatgcagggtgtctatatgaccatcagcagtgccctgacactgagcggtacaccgaaggatgccggtaactatctgatctctgtaaagattaccgatcagcagggaagagaagcagtcagcaataccttaccgttccatgtatacaccggagaggaaactctggcagacagactggtaacagataacttcaaacagtatgaaagcggtctgtatgcatgggatatcatggaaccatgggcaatcaaaaactttggaagcaatgtggatggtgaaacagaaagcgttcgtgttccgaaagacctggaagcatggttcggatctcatgtgagcggaacttacggatatctgggttatgatcttccgtggaaacaggtagtgagtggagacattccgcagaccctgtatattccggaaggatgcaacctgacactgaccaatatgaagattctgagcagcgttcgcatcgtcattgaaaatggcggaaaactggcactggatgattctgtggtacagggtatcatcgatgtacagagtggcggtactttctccatgaactacagcagctacaacaacgaatttaccacaggtgcatctctgtgtggacagcttcgtctggcagatggcgcaatcctggaaaatgcagctatctactctcatgcaaactatcttgcaaatggaaacctgacagaccgtaccacttccgagccggtagtaaccgcaaccggaaatgttacgatcaaaggcaaagtatttatcaagggcgatgacggcggaagcgatatcggacagatggccctgcgcgtatccaacggaactctgacactagaagacggtgcggaactggtagcttacggtggaagcggcaagacactgctgtacaccgaaggaggaacagcaattgagctggataatgcaacgatcacaggaaacggaaaagtaacagcaatcggaggagatgtactctggggcaatggcggaacaggtgcaaccggaaacggaatcatttccacaaaagaagcattccttcagggagcaactgcaaacacttccaacaaagccgtacctggaaaagcaaccgacggtaatgtaaaagtgacaagcacaagcaaacacatcgaagacggaaccgagatctccggcgcagacaacgatccactggcagatctgtactggaagactggaattaacccaactccgccgctggataaatttgtaacaactccggcactgtctatcagtgatgtggaagttgcaaatacaacctataccggaagtgcactggatctggttgtaacagcaaaagacggagaaaccgtactgacagaaggaaccgattacttccttacgttcaaagatgcagacggaaatgagatttccgcagattccattgtacaggcagatacttataccgtagtagtaaatggtatcggaagttatggtggaatacaggaaatccagtttaccgtggaaccaaaacagaccactctgagcgtgactacagatccggcttctgcaacatacgatggaacaagcaaaactccgaccgtggaagtaaaagacggtgaccagacactggttgcaggaacggattacgaaatcacttacatttacggggaagaaacaactgcgaaagattttgcaggcgcaaaatttgtagaagcaggcagctataagctggtcatcaccggaatcggcaattatgcaggttccaccggagaagctgtttttgagatcaaaaaagattccaccggaaccgatgacaccaacaaaggtgatgataagaaagacgataccaacaaaggcaacgacaatacttccaccaccgataaaaacgacggaaatacaacaaccgataacaacaaaacaacaggaaaagataaccagacggtattaaaagctgacacaacaaccagcaatacaaacaacacaaatactaccgccaagacatccaccagaacaaacagcgtgaaaaccggagataccaacaacctgtatatctggatcacactgctggcagtttcctgtgttgcactggcaggtcttgtagtatatacaagaagacgcagagcaaaataaaaatatgaaatgaaaaagatgtgggcatcatgcattatctggcatgatgtccacgttttatgttgcattgcatatcaataattggtccagtggaccaattttgattacgggcaaagggcgaacgttgacatggctgtattgctctggtagagtaataaaaacagaaggcatccggcagggtgtggttgggttatcaaaaattctgaaaaaaggaaaggcgagacagaaaaatggaaaagcagaaaatactggatcagatcaaagggggactcatcgtctcctgtcaggcgctggaacatgagccgctgtatacgaaagagggcggtattatgccactgatggcgaaggctgccgcacagtcgggcgctgtgggaatccgtgcaaatacggtgcgggatatcacgcagatcaaagaggtggtagcccttccggtaatcgggattatcaagaaagattatgaaggaacaccgatgtatatcacggtgacgatgaaagaagtggatgccctggtcgcatgtggtgtggatatcgtggcggtacagggaaccggtgccagacgcccggacggaagcagtgcaccggaatttatccgtgcggtcaaagaaaaatacccccagcagctggtaatggcagactgtgcgacgttggaagaaggaatcgcatgtgccgaggcgggggctgattttgtgggtactacgatgcggggctacacaccggagacaaaaggatgcgacgatatcgattatgcatttatccatgaactttccgaaaaatgccctgcaaagatcattgcagagggacatatccattacccggaacaggcaaaaaaagcgttggaagcgggtgcatttgccctggtagtcggtggcgcgatcacacgaccggcggagatcacatcaagatttgtttcggcgatccgaaaataagagagcaaatagaacgttgttataagaaaacagtgacggttgactttatgtaaaccaaccgtcactgtttttctatgctgaaattatatggaaaaagttatgttcatatggattaccgttcaccggctgtgtccagacccatcacccattttccgttggtaaaatccggaatatcaacgacagcgccgcccttggctacagatatctcggacagggcagtgatcgccatccaggaagctgcatcgtagacatctaccggcatcgggctgtcttcacgcagacactggaagaactgttcgaattcgagccagtccatgccgccgtggctgccctgtacgccttcttcgaggaattttttccagatcggatgatcgtaggtttcggcgtaggtatcagcgtttccgctgcactcttttctccagtcaaaatcgtgatcgcggtcttctttgcggtcgatgaagacagaatcggtggcttcttcgtacatgcctttggttccacggacagtgaagttacggctgtagtatctcggcagggtggtgtcgagtgtcagctggatggtttctccgtttgcacagcggatcatcgtggtgatgatatcaccctgagcaaaatgcgcctgtttcagtttctcgtcatcgctcttattctgcaggatgaactcgtggagtcctgcagatttggaagcgaaggaagacagggtcagcatccggtttccgtggttgatgttcaggatcttggcgatcggtcccagatcgtgagttggatagttttcacagtttctggacagatagtttctcagacggtaatgtctgttttcttttccgaaagcgatttcgtctctcagatcatgctgatatccaccggcgcagtgaacgacctcaccgagaacaccctgatctaccatatttaacaccatcagttcgcggcggccgaagcagcagttttccaggaacataaacggtgttttggttttctcataagcgtctaccagttcgtagcagtcttccagagaataagcaccgccgacttccatggctacggctttgccggcatacatggctgccagagcgatctccacatgagattcccaggcggttgcgatgatgatggtatttacctcttcatttgcgataatgtctttgtaatcggtagatacaaaaggtgtcggctgaccggcagcttccacgatttttgcaccttcctgtgcacggtcttcgtaactgtcgcagacagcagcaacctgttctttctgagccagaacgatattttccagcagatctttcccacggcatccaagaccgatatatccgattttaatgttttccatcagagtttctcctttatgtgctttttttaaatattctgagatttattatacacggatgccggaaattgacaaggaaaatagaatctaaatcctgtgaaaaatcgcttgtgtattgtgcagaaaatttctataataaaagaagaattgtccggaaaacagcggatattttgaggggtatgcaagaacaaacataatgtaaaggagataatgaattatgaaatttaccaatggttactggatgcttcgtgatgagatgcgggcagcctatgcagttgagtatggaagccaccgggtatacggacaggaactgacgatgtatctgccgtgttctcatatcgtagaccggggaagctgcctgaatattccgcttctgacggtgacactgtcgagtccgatggacggtgtgatcaaggtgtccgcggtgcatcatgacggagccgtatataacggaccgtttgcaaaaatttatacccgggatgcccatgtgcagatcgaggagagtgaagaccagctgatctatcagaccggttctctgaaagcggtgatcgataaagcaccaaacgggtataagatggcattttacgagggcgataccttcctcacggagtcgagtttccggaatctctcctatatgcagaacacaaaaaccgggaaaaattacatgctggagcagatgttcctggatgtggatgaatacgtctacggacttggcgagcgtttcacaccatttgtaaaaaatggacagatggtggagatgtggaacgaggacggcggaactgccagcgagatcgcctataaaaatatcccgttctatgtgacgaacaaagggtacggtattctggtagacaacgagggggatgtcgcttacgagattgccagcgaaaaagtagaacggatccagttctcggtagaaggagagcggctggattactatgtgatcagcggaaaaactccaatgggaaccgtagaaaaatacacggatctgaccggaaaaccggcgctccctccggcatggtcgttcggactgtggctgacgacttcttttaccacgaactacgatgaggcaacgacttccagctttatccagggaatggcagaccgggagattccgctgcatgtcttccattttgactgctattggatggatgcctatgagtggtgtaacttcgagtgggatcctgcgacatttccggatccgaaggggatgttgaaacggtatcatgaccgcggacttcacatctgtgtatggatcaacccgtacatcggacagaaatcctgcctgttcaaagaaggaaaagagcagggttatctggtaaagaaaacagacggaagcgtatggcagaccgatctgtggcagccgggcatggcattggtggactttacgaacccggatgctaaggcatggtatcagggcaagttaaagacgctgctggatatgggtgtagactgcttcaaaaccgactttggtgagagaatcccggtgaaagatatcgcgtatttagaccattccgatccggttaaaatgcataactattatacctatctgtacaatcaggcagtttttgaactgctggagcgtgagcgaggaaccggagaagccgtattgttcgcgcgttctgcgaccgtcggcggacagcagttcccggcacactggggcggcgattgttccgcaagctatgtctccatggcagagacgcttcgcggaggactttccctgtctctgggcggatttggtttctggagtcatgatatcagtggtttcgagagcaccgcaccggcggatatctacaaacggtggtgtcagttcggcttgctgagttcccacagccgtctgcacggttcttcttcctaccgcgtgccgtggctgtttgatgaggaagcctgcgatattctgcgggaatttgtcaatctgaaatgccgtctgatgccgtatctgtacggacaggcagtgcgctcccacaaagaaggccgtccggtgctgcgtccgatgttcctggatttcccggaggatcgcgcgtgtgatacgttggatcgccagtatatgttcggtgattccctgctggtggctccgatctttaaggagagcggcgaggtacagtattatctgccggagggaacctggtataacctgatcacaggagcagaagtgaccggaggaaaatggcagaaagagacgcatgattatcacagtctgccactgatgatccgtccaaatacagtgcttgctttgggcaataatgaccagaaaccggattatgattatgcggatggtgttagccttctggtatccgcgtttgatgagggagccgaagcgaaaactgagataccggatctgaaaggagagacggtgatgacggtgactgcgaaacgtgtgggagatgagattcacctgcatgtggaaggcggaaacggaaattatacggtgaagagcctttcgggttgcaaggtagttgtggaagcgtaagaatctgcggggacagagaagaaataccgaagcatatccgtagaaatgtcagaaaagccataatgcgaaaataagtaaatggtgaataacccgtcaacttcctgacatctccaaaatctgggataatggtgtgtagagtgtaaaaagtgtgtttcacactttttacgaaaaacaccacaggaggtattgatcatgaacaccaagttagccaccagacaaatccgattgaacgaatgggctgcaattataaaagactgcaaagccagtggccagaaagttgatatttattgtgaacagcacgggttatccagagatgcctattattattggctgcgtaaagtaaaagaagcagctttaacacaggctggttttgtagaacttcctgctctgacatcagaacagataccagccaaaacaattgaaaaaggaacctctgcatttgaaactcagatgattattaaaataaatgagattgagttctgtgtgaacgaaaactcgtcatcagaactaatatccagaatgctggaaatcatacgtcatgctcaatgatgcttccggcttccaacacgtttacttatgtaccggatatacggatctccgaaaaggaattgatggattgatctctattgttactggaacatttggcctggatccaaccgaagcgggatccatctttctgttctgtggacgcagaaatgaccggatgaaagtcttactctacgaaggcgatggctggcttctatgctataaaagatttaccgatggaaaacttcaatggccaagaagtgaaaaagaagccagagaccttacccctcaacagtaccgatggctgatggaaggactttccattgaacagaaaaaagtaatacacaaggtgaaaccagagctttattagttctgttttatatatgtacattgacagttttataagttatctaaatttccctgaaatgcctgaaataaagggtttttcagtgccatctgtggtataatggattcatggaaaacattactttaaccctggacgaactgaataagatgccgaagaatgccatagcattgctgtacatacagatgagcgaaagctttacgattttatctgcacagagccagaagatccaggatcagaatgaaaggctgatccatcagattgaagatcttcaggaacagattgcgatcctgacacaacagcgttttggaaaaagaacggaaactgacaaacaggttatgggacaactgtcgttttctcttgaaaacatgtgtgtcctgaatgaagcagaggcacttgtagaaaacggtattcctgatgaacctgacattgaaaaagccgttgtccgcagaaagagaaccaaaggaaaacgtgacctgaatcttcaggacatcgaagttgaagtgatcaaccacgattgttccgaagaagaattacgggaacactttccaaaaggatggcatcctatggaagatgaagtatataaagaacttcagtatattccagccagatttaaagtattggaacatcatatcaaagtatatgccgggaattctgattgcggcagttttctgcgtgcaaaagcaccggaacgtctgctggcacatagtattcttaccccggaactggcagctgccgtgtttaatgcaaagtatgtaaatgcggtacctttgaaccgtctttctgaagaattccttcgaaatgatgtcaacattccgcggcaggatatggcaggatggatgatccgtctcagtgagtattatctgcagccggttcatgatctgatgaaagcagagattatggaatcccaccatatccattgtgatgaaacaccatttatcatgcctcagcacagcaaggaatatatgtgggtgttccattctcctggtggaagcgatacccatccactcttcctatatgaatatctgggtggcagaagcggcgaagtcctggaaaaatatctatccggatatcaagggacactcgtaaccgatggttaccagccgtatcatacgcttatgaaaaaaagtgataggatccaggtggccggatgttatgctcatgcaagacgtaaattcacagagatcataaaagttgtgaagaagaatacgccgctcacgccaggacaggcagttgctgctgaagcagtcaaacggattgacgcgatgtatcatttggacaacatgtataaagaatcatcggcaaaagagagattagataacagacagcgctctgtaaagcctcttgtcgatgcctattttgcgtggctgaaaacattacagggaaaatcaaacgcaagctccaagttaaaagaagcaatcaattattcgatcaatcaggaaatataccttcgaagattcctggaagatccgcttcttccgctggataacaacgatgcagagcgtagtatcaagtctttctgcgttggaaaacattcctggcatatcattgattctacaaaaggagccaaagcgagtgctctcttatacagtattgcagaaagtgccaaggcaaacagcctgaaaccatacgagtacttctgctacctgttgacagaacttgtgaagtatccacgaaacgatgttccaacagaggtgttaaaaactttaatgccatggtctgaagaactgccggatcactgtcgaaaaactaaatcaaggtaaagctcagtgccagccttcgggctggcatatctttttcgggaggacgagttatttaccatatacgaaaataaaattgtaaaattatatcaccacaaagaaaaagcatgcatacagaagcgaaaaatcctgtatgcatgcttttttgatgcattgcatattaaaaattgatctggtgaatcaatttgcttacataagatgcgtagaacactgctggatatatctggattctgtgttagtcgtgggagattgcagttgaaaaagtcctgtgtgcggatcagttgccggcagccgtaccgcgctccgcccagcgaaaccacttttgtggaaattcaaagacaaacaggatgccaagcacgatcgccaccgcgatcttcaaagtctggaatccacggtcggaagctttggccagctgatccgtcacgacataataggcagtccagtagatccctgcccccggaaccagcgggaagatgcctgcaacgagaaagatcgtcaccggacagtggcgccggaccgcactgagcctggagagaaaaacgacaagaaccgtggcaaaaaaggtggaaccgaagagcccgcagccagccagtagtaacttgtagcagatccagccacagccaccggccagaccacagtttacataatattcctttggtacctgaaagagcagggcgaaagcgatcgtaccgacaaaagcggtaagaaattcgaaaatcagatgtacggacataaagataacctcctgagagatagataaatatatttgatttacgcaagcaataggtaagcttcgcaaagcgtatgttatctcgttttataaaatccgccgggacgaaagaaacccatgcattcatagaaccccatgaatcacggcagaatcgcaccgcccacaaaatggtgatacccgatcattacaagaccgacgcccattgcgatactgaacgtgacaagcagtgcgtccagcatgcggaccgcaccggcaatatagtcctggtcggcgatatcgcggatgccattcgtaaacgccacaccgggaaccagcgggatgatggaaccgatgataatctcactcagatgatgtcccagtcccagctgatagatcagcacagcgatgaaagtcacaaacatgccgccggaaatattggttgcaatcttggaaagctgtcctttcaccacgcacagcagatagacatacaacagaagccccgcgataaaagccacgatacagtccacaggatcgccgccgaagagataacagaaacatccactgcccacgccggaagcaaggatctggtagagattccgcttggcaggcatctgctggatttcctgaagttgctgataggcttcctccggggtataagatccgtgttcaatctcacgggagagctggttgaccgcagtgacacggtcaagccgggtagcactcaacgggatgtggcgtacccaggcaaagttttgatccgagttgctgtcagccgtgagaaaaaaaccactgcttaggacaaacggatcacacgattcgatgccgtaggcatgggcgatccggtcgatggtttcctccacacggaaaatctccgctccgctcgccagcaggatatccccggcaagtgccgccacatttaacgccatacggttatgttctttttctacagtttccaaaataaaatcccccattgtacacaaaagatgcggatacagaaatagaaagattcgggatgtattcgcgtatggtatgactctaacacattttcgaaagaaaacaaagaaaaaccgatgcattttcagcagaaaatcaggagacatttcaccatgtggatgaggaaaagcagcaggaatcgacggaaacggtgggattttttgcttgttttgaaataggtcttgacggggggaaggaatatctgtaatatattcaagaagtacgcccatctggttgaaaaagttggtgggtgagaaatggaaaatagaaaagaagtaaccggcggatcgtgggttgactgtgggatggcggttatgaaaaagaggataagtatatgaagaaagattgggaaaacgtgacactgatgccggagtttgacgagcagggtgttgcctgctatcggctggatggcggggattatctgaatgagtattatgtggtttcggaggcggagacgcggaagcttctgaatacaccggagattgttgggtatgaggtttataactgcctgattccttctacttctcagatgttgtattatctgaaagaacagaagaaggtgacgacggcaaatattttatcgatccttcgcggtgcgctgaattatccgctggaggagagctgctaccgggagcatatccgtgtgcatgatatcagtttcttatccagtgagcgtgtatttcaggaggaagagatcgcagggctggagatcaagtacagtaagctgacgatggtaccggacagcacgttgatgatcggagatatcattgcgagtggagagacgttgatccactgtctgcggtatgtgactgatttttatcggaatcacggggcaaagcttcggaatattatcatctttacgatcggtggaacgaagggaattgagattctggaagatctgacgcgcgatatccgggagttctggccggaatttgaaggatttatcacggtatattatgaaggaatctttggaatgtactcggataaaggtgtgtcaggcatcaaccttccgaatgtcgacttctactggaaaggcggtatcgtggctccagaatttcgtcgggagacactttccatgtgcagtcctctgtttgaaaaatgtattatctatgatggcggtgcgagacgttacgagatccatgagcatgtagaagaagtgctggagttctggaacgggatcaaagagcgcgccggtcagattgattttggaactttactggaagaaaaactcggttatgaacttccgatcagttacgaagactggatccatgcaaaccattatgaaaagatccgtccggcagatacaaaatggctgtatcgtcaggaacagggatatgtggagagcatgaagaacattacattagaagaactggcgcagcagcggatcgatgaatttaccggtgcactgcgtaaatatattctgtaatggaatcagccgaaagacaaataaggttatggaaacaaactgagacgggagaaaacaaatgaaaaaagagacagaacagaaagtagacatcgattacgcggatcgcgtcgtaccggaggaaggaaagaagggctttgtgaccatgtttatgatcatgcttggatttaccttcttctccgcaagtatgtgggcaggtcagcagctggcagcaggactggatttctggggattcttaaaatctctgctgtttggtggagcaatccttggtctgtataccggacttcttgggtatgtcggagcgaagacaggtatgagcatggatctgcttgcgcagaaagcctttggagagaaaggttcctatctatcctctgcaatgatcagttttacacagatcggctggttcggtgttggtatcgccatgtttgcgattccggtagcaggagaattattcggtgacagtaaaactgctatgtgggcgcttgttatcgcagccggtgtgtgtatgacagcttccgcttactttggtatagattctctgactgtgatcagctatattgcagtgccgttggtagcagtactcggtacggtagctatggttatggcaatccgtcagggcaacggaacgatcgtggatcagttcgccgtatccagcggttccctcaccgtctttggcggtgccggtctggttgtgggatccttcgtatccggtggaaccgcaaccccgaactttacccggtttgccaaagacgcgaagacaggaacgatcgcaaccgtagtagcattctttatcggaaactccctgatgtttttcttcggagcaattgcctatattttcgtaggtggaaatgatatcttcgaggttatgatccgtctgaatctgttctacatggcagttctggtacttggtctgaacatctggacaaccaacgacaatgctctgtatactgcaggtcttggtctggcaaatatctttcatcagaagaaaaaaccgatggttctggtatccggtatcatcggaacggtgctttctgtatggttgtattataacttcacaaaatggctgaacatcctgaactgcactctgccgccggtaggtatcatcctggtactttcttactttatgaataagaaagagtatgaagatccgaccgcaaaacctgcagtagtcaactggttcgctgtaggtggtgtgatcctgggagctgttgtggcaaatgttgtaaaattgggaattgcttccattaatggtatggtggtagcagctgtatgctatctgattggtcagggaattaccaaaaataaataaaaaatatagagaaaaatacaaaaaaccgttatgttgtacgaaaaaccgtaggcataacggtttttttggtatacaatagagcgtagagtttgcgagaagataatatggagggttgcataatatggaacaggaaaaaatcaatcgattgcaatggatccttgatgatgcagtggcaaggggagagatcccgggcgcgattctgatggtcagaagagaagggaaggaaaccgtgtatctggaaagcggttatgcggatatcgaggcaaaaaagccggtgtcgagagacagtatttatcgtctctattctatgtccaaaccgatcaccgcaactgcagtgatgattctggtggagtggggactggtcgatctggcagatccggtatgtagatatcttcctggattttgtggacaaatggtggcagcagcagacggacatgtggaaaagccatggcgggatgtcacgatccaggatctggtgaatatgacctccggtctggtctatgacggcaatcatctgacaggaaaacagacagaagccttatttgccgaggtgattcagggacttgatgagggagaaggaggagcttatggtacggtggagattgccaaccgtctcggacagatcccgcttgcctttcagccggcgcgctcctggtgctatggaacttccgctgatgtggcaggtgcccttgtggaagtggtttccggtatgcggttcggagattttctggaaaaagagatcttcactccactggaaatggtggatacaggcttttgggtaccggaagagaagcagagccggctggtgaaaacgtatgagtgtaacgaaggaaagccgtcggtactctataccggtaatcatctgggcatccggaatgcgatggatcgccgcccggcattcgaatccggtggtgcaggcctggtgtctacgattgatgattattctcattttgcacagatgttgttaaatggcggaagttataagggaaaacagatcctcagtccggcgatggtacgctttatgaccggtcatgtgctgagcgcagagcagcaggaagtctttgaacgggaaggtatggcatggctggaaggattttcttatggtaatttcatgcgtgtgctggtgaacccgggcagatccacaacgctgggaagcaagggagagtacggctgggacggctggctcggctgctattttgccaatgcaccgcaagatcagatgacgatccttatgatgacacagaaaaaagattcaggaactttccggatgacacgactgttgagaaatacaatttataatcagtaagcagccatttctcgaagaaaaatgagtggattacgaatgctttggaggattgtgaaagtacgcagtacggaacaatccggtatcagaacaaatataagaaaacggagaagatgtgatgaaaaaaagagaatcatttaacacccggtggggatttatcctggcgtgcatcggttcggcggtgggaatgggaaatatctggatgtttcctaccagagtatcgttatatggaggcggagcatttctgattccgtactttatctttgtggcgctgatcggatttaccggggtgatcggagagatgacattcggacgtgcaacgagatccggtccgattgatgcgtttggaattgcctgtgagagaaaaggaaaaagaaaaccgggagaagcactggggctgatcccggtggtcggctcgctggcgatggcgatcggctatacggtcgttatgggatggatcttaaaatatacggtcggcgcattcaccggggcgacactggcacctgctgatgtggacgaattcagtgctgtgttcggttcgatggcatctgcgtttggcaatacaggctggcaggttgtgatcctgctggcagctatggggatcctgatgttcggtgtcggaggcgggatcgagaaggtcaataaagtgctgatgccggtatttttcctgctgtttgtgggacttggtatctatgtggcatttcagccgggggccgtggacggatatcactatatcttccgtgtggacggcaaggcgcttggcaatccgaaaacgtggatttttgccctgggacaggcatttttctccctttcagtggcgggaaacggaacactgatctatggatcctatctgtcggatgaagaaaatattccggctgctgcgggaagagtggcattctttgatacactggctgcgctgcttgcatccctggtcatcatcccggcgatggcaaccaccggagccaagctcgatcagggcggtcccggactgttatttattttcctgccaaatctgatcaaaaatatgccgggaggaaagatcattgtgatcattttctttgttgctgtattattcgcggggctgacctccctgatcaacctgtacgaagcaccgatcgcaacggtgcaggaaaaattccatctggagagaaaaccggcatgtgcggtgatcgcagtgatcggcgtgattgtttccattctgatccagggtatcgtatccggctggatggatgtactttctatctacatctgcccgctgggggccggactggctggtatcatgctgttttgggtatgcggaaaagagtatgtggaaaaacaggtaaacaaaggacgaagcagtcaccttacctcctggttttacccaatctgtaaatatgtttatgtgccggtgtgtatcctggtgctggttcttggaatcgcgctgggcggtatcggatgaaaaaagcagctgcagtaacctggttactgcagctgtttttctcatagttacgcttgttccgcaggcaaaaacatgatatgatacaactgtcgggaaaatacaaatcaaaaaacacatcacacttttgttgcagacagtaagatattttacaattcatccgtctcatctgaaaaaatataatcatttaattcttcaaaatccaaaaattcagccaatgtcatattaaaaggctgaattggaatccgagcttccagtttgcaagtttaagttctgatttagctaatcgcttgcaaaagtaaattctggcaaatcaaaatatcatgatttttatggaagttagttttgcaaaattcttcaaaactggaatttactattagaaacaagttgttttatgcttcatatgctgatattcttttttgagatcttaatcttctgaaaaaagagtcacgttaagcggaggtcgaattttatttcttttttcgcaagattaaattccacccctcattcggttcagtattttttccgaatggcgctacgttttcttattttttcagtaatagaggtgtaaggttaatctcgttagcgggaatggattttattcctaacttgtcaagaatatcctcgccattaatgaagctgaacaactggtgtgccgactggttattcagcttttttctgttatatgagttgatattactcatcataagattgatatcatcctgagttaagttatcaaaagaggttttcttcggaagcacacgacgaatcatctcatgtgtaacttcacaaccacctttttgatcagaacgctgtggatcacaataaaagatatgtgttctgcgaccattgcccttattaaattcgattgccagcgggttagtaaattcacttcctctgtcggtcaaaatcacctagaagaggctagtgaatacttcatgtcttaactgttcatacaaccagtcaaatatttctgtaactgacttggcggtattgttatcacggataaaagcaagcattaaactactatttctaaagtatatggtcaacaagactttaccgcctttgcgaccttctactgaatccatttccactaccggaatatcagaattcgcagcaagataagcttcaaaatcctcgtaagtgcgttctacatgacactgcttgtctactcttacaggcttcttatgtgagcgggtacgataacggacctttctcggaagatcaacgttatctacagataacgactttctgagcgagtagtctcataattcttctgagctgatttggcagaataaatatgcttctccagcttacaggattgccgttggatacagccgttacaaacgtatggtggtttcttcagtttgttacaaaccaatacctcaaactgcttgcaatgctcgtagcactttacacgaggacatctcttgcagctttttgaatactgtagtttgcactttgaacatgctgttccgtattcatcacaggtatttcgcttgctgcagggattgaaggaatctttacgtacagtctgacttcttttgagatagtagaagagtccttgccaagttccctacctatctcggtaaatgaagctcgttctcttaagcgaacttctattgtggctctttcatcaagaaccagatgtgaattcttagccatggtattctccttggataatgccatccggactctattgctgagccacaactataactagatatcaagaggtttgcaacactaacttctaggatatattttgcaatactaagttccaatttttgggtgaatggactggaatttaattttccaattcaccaatatcagtcgtacacatgcaaccatcgtataccgaaacggagcatttgcaatcgttgataacaatgcaacaaacggaacaaacgttaacggtgttgcagtagcggccggaaaagaaagagctctgacaggaaatgaaactattcgtctggcagatgaagaatttctgtttcgtgcataaaactgaataatatatgagaggtatgaggatgatttataaaatagcagctcacagcgatgtgggtattgtgaagaaaacaaatcaggactcagtactcgtgaaaatcgcgcagacaaaccatgataaggtttgtctgtgtgtcgtgtgtgacggaatgggcggtctggctgatggtgagttggccagtgcgacagtgatccgggagttcgatcagtggtttatcaataaacttcccggactgctggaaacaccggaatttccaatggatgaacttcgtgtacagtgggacgacctggtaatgcggcagaacaagaaactggcaaagtatgcatccggaataggaacacgcatgggtacaacagtcgtagcttttctggttgtggatgacaaatattacatcatgaacatcggcgactcgagagcttatatggtttccgatgccatctatcagctgacaaaggatcagacctatgtgcagtacgagatggatctgggacatctgacctgggaacaggcacagacccatccacagagaaatgtattgctgcagtgtgtaggagcatcggatgagatccatccggattattttgtgggagatgccaatccggacaccacctttattctctgctccgatggattccgccatgtgatctcgccggatgagatctatgagaagtttcgtccggaacttctggagaacgaagatattatgcttcagaatatcgtctcactggtggaactgaacaaatccagaaaagaagtggataacatatcggcagctgttatccggacatgtcgggagggataagcatgctgcagataggttcttatgtagacggaaaatacaaagtattaaataagatcggccagggcggtatgagtgtcgtctacctggcattgaatgaaaaagcaaataaaacatgggccatcaaagaggtccgaaaagatggacagcaggattttaccacagtcaaacaggggctgatcgctgagaccaatatcctgaaagaactgaatcacaaatacctgccaagtatcatcgatgtgatcgacgacggggattccttcctgatcgttatggattatatccagggaaaatcactggataagatcttgaaaggaagtatggaaaaagaagggcttcccatcgcactggacgatgtgatcgcctggggcaaacagctgtgtgaagtgttctactaccttcataccagaccgaatcccattatttatcgagatatgaaaccgggcaatgtcatgctgaagccggacggagagatctccctgatcgactttggtaccgcccgtacctttaaacaggggaacagagaggataccacatgtctgggaacacccggatatgcgtcaccggaacagtacggaggaaacggacagtccacaccccgaagtgatatttactgtctgggagctaccctccatcatctgatcaccggaagaaatccttcccctgcaccatttaacttcccgaagatcacacagtgccggccgagtctggtagatgagatcccgagagaggatatgaacaagctgcttggcttagagatgatcattgatcgttgtacacagtacgaaccggagaatcgatatgaatcctgtctggagatgctgtacgatctggaatatatcgaagaactgagccttccatatcgaaagaaattaagaaacaagctgcttggctttggcgtcagcgcagcagtagctgtcttatgcggcggtatttcccttggctgtatgctgatggaaaataaaacagagcagagcggttatgattattatgtagaccaggcagagaagagtgacggaactgccaaagtcaattatgcgaaaaaagcagttgccatcgacccgggcaaggaagaggcctatctggtttatctggatgccctgcgaaacgatgaagacggtttctccggtcaggatagtcaggattttaaggccctgctgcagcagatggcaggaagacagacctacgaagaagtactggaaaataatctggacggttacaccgagctggcttatgagctgggaatggcttactacttcccgggcggcgccggaaaaccggcaggagataaagaacttgcaaaaaaatggttcggtatcgtagcacaggctgtattatccgatgagcagctgaaagcattcggtttggattccacagaaaaattatctgcggacaagatccaggaatatgatatcgacaccaatctggtggaaaccttcttaagcatctgtagttattacggaaaagtgggtcaggaagataccgtaaccggtgagatcaaatattcctactcggatttctgggtagaattaaacggtctggtaggcggacttccggagaacatcagtacagaaagccgagaacgtctgacacagcttcgactgttgaacgatgtatcttatcagctgtatgaaaatgcaaaacagttcgtatcagatgccggtgtggacaaggcaaccttccagggcgccctggcagccatcgagacaagagtttccggtgctgataccggttccaaccagacggcacagcggatccgtgataatacgataacaaccgtggataatacaaagaaactggtagaatctctgtatgcacagaattctgatgccgtgaagagcggaggtgatcagtaatggggcagacacaaaatattgaacagcagatccggtttctgagcaatctgcagctgggatttgggattgctgcattattgttccttgcactggcgatattccttttcttctatctgcatatcccgcaggtatttaatgaataccggggaaagagtgctcagaaagccatggaagagatggcagccaacagcagcgactccggacgtatcgtttctatggataaaaagtccaaaaacaagaaaaaaggaaccggacagctggtacagagacgttactatacagacaatcttaccgatgacctcaacggccggatgagccaggaatttggcgaaccaaccggtcagatgaatctgaatatggcaaagagttccgaagccaatggcatgatgcaggaacctgcagccaacggctcggaagccacagatgtgctggatgcaggcatgatgagtggagccgaggccacggatgtgttagatccgtccatgatggcaggatcggaagccacagatgtactggatccgtccatgatcgccaacccgctacaggaaagacagcatgtatctacaccggaacaggaaggaaccatggttctggatccgaacatgctgcagcattccaacagtacctttgagatagaaagaagtatcatcctgatacatacggagaaggtgatctgatgaataagagaaaaacagcaaggatatttaatgatctgtcgatggctttcttccttatatcatctacagtggtcgcatttcttccgatagctgacagagaaaaacacccggcaatagcagtacttgccggggggatcttctgggtaggattgttatggggaattttcctctacatcctcagttgtcagaagataagaaatctgaaaagctatcaaaattatcgttcggtggagcgcatcggtgcacttacacccggatccaccaaagaaggattggttgcagatcttgcattcatcccgggattcctagtgattatactcggaacctacgtgttcaacataccggatcccgtcatgttagtttgtatgcggataaccatggtatccttttacggacacttcgtcctgaacggaagggtatacaagtttttgcataaaagaaaagttataagataccgaaaggtaaaagaggaatcagccgagaaaaatactcagctgaaggaaggagtctgaggacatgaaacaaaaaacaaagagaatcctggcgttcgccatggccgttgtcttcgcattgtcaacctgcgtaacctccagcccatacaccgttatggcgacggaagcaggagaaacgattgcacctcttgcagaagagggaagcggcagtggagaagtcactccgggtacaacagaaacaggaacacctggaggaagcacggtaataccttctggtacaccatctgaaccgactacaccaccggcagcagaaacaaaatatctgagtgtaaaggttgttttgggcacggatgctggaaccattggcggagtagaattaggaaatataagtttcactctgtcaaatggtgaaaaagaagtagcttgtactgtggatccaaaatcattcacaactacagggatggaatatgctactggtaaaacctatagcataaaagaaggtagcattagcgacaattccggaatgtatacgctcgaaaatattacatctacattagaagatgtggatttagaaaatccaacattggttttaaagattggaaatttgactccgaaaggtggaacaatctcaggggctgatagtatcaaggcgttgtctgaagtgaagtacactttggatggaaattggagcgacaaggtggatcgatgggtaatcgaaggcagcaacgctgcaaaggctactgttgatgctactggtgttgtttctgcaaaagtaggtggacaaagttttagtctggtagcatattgtggaaattatctgctggcaagaaaaaataatattacggtagaaaaaaatgtaacaagtttgagtgtgactacaagtaaatctccagaatcctggaaaaaactatgggatataaccataaaacttgtagatgcagcaacacaagccggaatccgaggtgaaaaagtacggtatacggttgaaggaaaaccatataccggtacgacagatgcgaatggtgaaattaagaacagttttagagaaaataaacatcataaggatacaattaaagtaacagctgattttgatggtgatgcagtatataaagcaagcggcaatagtatcggttatcagactgaaaaacagatgggtacactttcttttgacaagaaatatacggaagaaaatccgctggaactggtatatggaacagcagatatcgtaaagaaacttactttggaagatgaagaaggaaatgtactggatggcgatgacgatacagttctaacattagatgtaacaccagaaaataattccagtgttggagtgaacaggtcggatgacaagaaagaaatcactttccatgcaaaaaatgtatcaatcaaaccagttttagtaactgtaactgtagaaacggaaaattacaaattcagaacagaaatttatgtaaaagtaaatccatatgaactgaccctcgacaagacagtttctgtagcaggaaccgataagacaacgtatgacaacacaaaaatctacgatgcaacaagcgcagtagatgtaaaggctactctgaaaggtgacgatactttaacagaggctgcacaacaggaagtaacggataatttcaaagatattatctttaaaggttatgacagcggaattaccaatgtaaaaggtgaggaagaagaacagagctttactttcgcaccgacagactttacacagtgctcgtcactggaaggcaaagatgcaattaaaaataattacgtcatcaaaaaaagtgagaaaacagaagtatctgtaaccattcagaaacgagcactgaaactcacagtagctaatacagaacgtccatacagaagtctggaatataccgccgatctgagtacattagtttccgtaaatgatccagcgggtgatacaggttttgcgggaacagagacgatagaaaatctggaaggatttacctatccgaccgtagtggatactactgcagaaggtcttaccgcagagaatgtaaaagcaaacgataaagcaacctgtgatatacatacagatgtgctgaccctggatgctaaaaccggtgatccaacagcaaactacaaatttgattttgacaattatacacatggaacactgacagtgacaaaagaaaatgtcacggacgcaacagactatgtaacaattaacaatgcttccagtattcacgcttatgagaatgaaaaacatgatcgttactatggaaaagaaacaacgatcaagtttgcactggaaggaaattacaacagaatctatctgaaaaacggaacagatatcacagatagtggtttaaatgaaaaagaagtgccggaagcaggtacagttgtaacagaaaaaatctatcttgctaatgtagataccaataccgttgacggcgtggaaacaacaacaacaaaatatgctaccaatccatttgagatcagtttcaaatatgatccgaatgcaccacagtgcagtgagatcagctttggaaaagacaataaagtagcagataaacttgcagacattattacctttggcgtgtatgacaacaagaagatcgaagcaaaagtagcatttgctgatgcattatcaggtgtaaaaggctggtcttattatgtagccaatatagacaaagatacagcattcaaagatctgctgacaaattatgattatgcagaacagctggtaaatgaaaaattcacagccggcgatgatacgtataccgttccggttggtaaattaaaaggagatcagacactggaatccaataattatatcgttttcgttaaagttatcgacaatgttggaaacggtatgatttacggatcgaacggtgtggttctggaaaatattcatgatattgacattgaatacaaagaaattgcagcagatacaacaacacagcagggaatcgtagatggcagaacctactattccggtgatgctaatctgacactgaccgcaaaagagaatgccagcgacagtaaattctattccggactggaaaaaatgcagtacaccatttccagatactggggagatggaaagaaagaagcagaagcagaagtaacggaaaagaatgcaaaaggtttcccgaaagatgttacactgaaagaacttcagaactactgtactatcgaaaaacttttggaactgaaaaatgatgcaggaaaatcccaggtgatcacggtatctgcaaatgcaaatgacaatgcgggaaatgagatggaaaaccgtgcagactatacgttggttttggattctatcgcacctgtggtagcatccagttatgcacaggtaaataatggtaccgcattcttaaacggacattatgcaaacagtgatgttacctattctgtaaatgttacagagcgtttcctgaacgaactgaaagtaatggtaaatggaatcgattatacactggatgagctgcaggcagcgaaggatgctctgggaattaaagagatcactatggatccggtcaatgatttcgcagagacaaaagacagtaccgtatacaaattcactgttgtattccacagagatggtgaatacaccgtacagacgaaagtagcagatgcatccggaaacaaaggtgaggatcaggcattttcatttgtgattgatactgtaagacctgagatgcaggttacttatactgcatatcgtccgaacggaacaagctttgttctggatccgtcccggggacgtgcttatgcaaatgaagaagtagcttatgtagctgtaacagcagtgatcacagagagaaacttcgctgaagacaatacaaaagatacattcgatacaaacgatgcaaatgttgcttacacagcagtaaacagcaaaggaaaagcagtggaagttgcagattatgacgcagcgatccgcgaagaatggaccaacaaaggaaatgtcagcacagaagacaaccgttttgtatatgaactgtctctgccgactatcagtgtagatgccaactatgatttcgcttatgactacaccgatctggctggtaatccgatcaatgaaactatcaaacaggcagttacccttgaccgcgtaaaaccggaaggtactgtaacagtagaagatctggtgaacggatctgcttctgagacatggaacaagttcctgagtgcaattacatttggacactttggtaagaacagtgtaagagcttctatgacaagtgatgatgagactgcaggtgtggcagctactcagtatctgacctctgcaaaagcactgacaagaagcgaactggaagcaagaaccggatggaccggttacagcagcaagatcagcctggcagcaagccagaacctggttgtatatgaaaagatcacagataaagcaggaaatatccagtacatcagtactgacggaatcatcgttgataatgtggcaccgatagtgaagatcactcctaccaatcctggatggggcaaaggtgtatacagcgcttctgataatcctggatttgacatcagcgttaccgatcctgttgtaaacgatgcatatgcaggactgaagacaatttcctacacgatcacaaacggaaccaccggttatgtagaatccggaacaatggcaaacctggagagaacatctcacctgcagagctggaccggacatgtaaccatcaacccggataacttctactccaacgatgttcgtgtaaaagttaccgcagatgactggtctaccaacgatgtagcatccgaagaaatcagtatcaaagtggataacaaagccccaatcgtaacattctctttcgatcagagcgatgtacacaacggaaaatactacaacaatgacaaaactctgacaatcacagtagacgagcgtaactttgatgaaagctaccagccacaggttacatctacagcaggcggcggatacagcatcagcggatggtctcacaacggagagatccatatagctactgtaaccttcagcggcgacagtgattacactgtaacttatgactgcttcgacctggcaggcaacaagtccaatactgagaaactggatgagttcactgttgataagacaaaacctgtgatccaggtttcttatgacaacaacagcgcattgaacaacaactattacaaagaagcaagaacagcaaccatcaccatcaccgagcataatttcaatcctggtgaagtgacagttacaacaacagcacagctggatggtgcagcagcttccgcacctggcgtaagcggatggtcaggatccggggatacacatgtggcaaccgtttcttactctgcagatgcagattatacatttaccatcagtgcaacagacctggcaagcaatgtatccgatccatatgcaacagaaagctttaccgttgaccagacaaaaccgacagtagagatcaccaatatcgaagatcgttccgcaaataacggagaagtagctcctgttatcacactgaatgatatcaacttcgacagcggcaagactgttgtccacctgaccggagctaacaagggagaggtagataccacaggtatgtacacttctgtagcaagcaacaaaggtcagacacttactttctacaacttcaaagaaaatatggatgatatctatactttgactgctgaggcaactgataaagcaggaaatcagtacagcacatccaagatcttctctgtaaaccgtgacggttctacttatctgtatgacgattatacagaaaaactgatcaagaatggttacaccaacgatccgaagaatctggtagtatccgagatcaacgtagataccctgaccttccgggaactgacggtatctgagaacggaacacagaagactctggaacagaacaaagactttgaagtaagtgagtccggaagcgatgtaagctggaaagaatacaagtacaccatcaacgcatccaacttcgaaaatgaaggagactacaacgtttccatctactccgaagaccgcgcaaccaacgtaacaaccaacacagccaagtccaaagacatcctctttgcagtggataagacttcaccggttatctctctggctaacatcgaagacggcggaagatacaaagtagaaagccagaaattcacagcaaacgtagatgataacatggctctggataaagttgagtattacgtagacgatgagctgaaacagaccttcgatgcagacgaagtatctgcaaacggcggttctctggacctgagcgtggattcttccaacacattccagaatgtatctataaaagcttatgacaaagcaaacaacgaagcaacaaccgcaagcgtagacgtcctggtatctgcaaatacatgggtacagttctacaacaataaaccggcattctacggtacgattggaggcggtgtggcagcagtggcagctgcaatagccgcaggcgtacacttcagtggcgcagctgcagcaggaaaaacagctgcaggcgcaggtatcttccttgcaggtaagaaaagaaaaaaagatgaagagtaaataagataaaatgaaacagatccggaaagagtatccggagaagaacgatgcatacaaagaactgttcagtatcttcccggtcacaggccaaaatgcatttgcacataaaaaatattgtttttataattgacatttccatagaaaagagttatctttgaaaaagataataaaactattttattaagtttcgaaaactcatatatggagggcatttcacatggaaggtaagatgaaagtagcagtgatgaacggtatcggcaagatgggatttacggagcgtgacattccgacgccgaaggatgatgaagttctggtaaagctggattatgtaggaatctgtggatcggatctgcattattacgagagcggagccatcggcgattatgtggtagaaccgccgtttgttctcggtcatgagccgggtggcgttgttgtggaagtgggaaaagatgtcaaacacctgaaagtcggtgataaagtagctttggagccgggaaaaacttgcggacactgcgaattctgtaaacagggcaaatacaatctctgtccggatgtcgtatttttcgcaactccaccggtagatggtgtatttcaggagtatgttgcgcatgaggcagatctctgtttcaaactcccggagaatgtaagcacactggagggtgcgctgatcgaacctctggctgtcggtttccatgcagcgatccagggagatgctcatctgggacagaaagcagtggtgatgggtgccggatgtatcggtctggtttccatgatggcactgaaagcccgtggagtatctgaggtttatgtggtagatattatggaaaaacgtctggaaaaagccctggaattgggagcaaccggagtgattaacggcgcaaaagaggatgtgatcgccaaagcacaggaactgaccggcggggccggtatggacctgatcatcgagaccgccggtacagagatcaccaccagacaggcgatccatatggcgaagaagggttccacgatcgttctggtcggctacagtaagagcggtgagatgaccctgccgatgagtctggttctcgacaaagaactcactttcaaaacggtcttccgttaccgccatatctatccgatcgcaatcgatgcggtagcttccggaaaagtaaacgtaaaaggaatcgttactaatatttacgatctggacgatgtacagcgggcgatggatgagagtgtgcataataaggcagacattgtaaaaggtgtgattaagattcatccgtaagagttgaaagattcgtaaaaaagcaaaaagtatacaggtgtcaggcatttctacgcaagaactttgtaagagtgtctggcacttttaaaataaaaagtcggaattgacctataaatcagccgaaatcctatctggaaaatctcttgttttttgagtaaaataaaagtagtgggcggcgattgcgccgcaggaaaatagttactggtcacagagtgaacagtaatgaaaataacaggcatggcggtccgccggagagtgcggcgggacggccggaaaagaggtttgtgatgaaaaaatggacaagagtcatgtatcagccaaatcttcccctggaagcaggcagatatgtaacagcaagcaaagaacatattgcattatccctggaggcagcgacagagggtatggtgcttttgaaaaatgagaacaatatcctgccgttaaagaacggttccaggatcacactgttcggacgcggaagttttgactatgtcaaaggtggcggcggaagcggcgatgtaaccgtatcttatgtacataatctgtatgatggtttcaaaaccctggaagataaagtaaaggtatacgaaccggtagcaaatttttataagaaaaatgtagaagaacagtatgcgatcggaagagcaccgggtatgaccgaagaaccggaactgccacaggaacttctggatggcgcaagagcattcggggatactgcgcttgttgtactgagtcgtttttccggagaaggatgggatcgttccagtgtggaatacaatggcgagttcaacccgtggccggacgagacgagcatgccgaaactgtctgcgcaattgtatccggatggagatttttacctgacaacgggtgagaaaaaactgctggcgcaggtagaagaagtatatgataagattgtagttgtcctgaacatcggtggtgtgatcgatctgtcctggatcaagagagatgataagatcggggctgctttatacggtggtcagggtggtatggaaggcggaaccgcaatggcacaggtactgtgcggtctggtcaacccatccggtaaactggcagatacgtttgctgcaagactggaagattatccgtccacggaaaacttccatgagtctgtagaatatgtggattacaccgaagatatttacgttggttaccgttattttgagacgattccgggcgcagctgaaaaagtggtttatccgttcggttacggtctgtcctacacaaccttcgaggtggagacacagaaagcatgggaagaggcagactctatcaacgtacaggtggaagtaaccaataccggagatatggccggtaaagaggtcgtacagctgtattacagtgcaccacagggactgttaaagaaaccggcgaaagaattgggtgcatttaagaaaacccgccttctgcagccaggagagagtcatacgatggtactgaccgtcacaaaagaagcaatggcatcctacgatgatcttggaaaagtagcaaaatctgcttatgttctggaaaaaggagcatatgctttttatattggaacctccgtaagaaataacggaaaaacagcttatgaatatctggtagcagaagataccgtggtaaaacagctggaagcaaagctgacaccgtcaggtctgtctaagagaatgctttccgacggaacctacgaggaactgcctcagactgaaggaaatgatcccaatgcctgtgcatttgataaaatggttccgggaactgatgagggcatcctgccggaagtacgcttccgcgagcagcgtcttgtactctacgtagtaaaaaaaggcgtaaaaccgtttatcgaagtagcagaaggaaagatcactctggacgagttcatgagccagctttccgacgatgatctgatcgaactgcttggaggtcagccaaataccggcgtggccaatacctttggtttcggtaacctgccggattacggtgtaccgaacattatgacagccgacggacctgcaggtcttcgtatcgcaccggaatgtggcgtgtgtacaactgcatggccatgcgcaactcttcttgcctacacctggaacccgaatctggtagaaaaggtaggagcagccggagcagaagaagtgaaagaaaataatatcgccgtatggctgacacccgctgtcaacattcacagaaatcctttgtgcggaagaaacttcgagtattattccgaagatccgctgcttgcaggtaagatggcagcaggtatggtacgtggtatccagtctcagcatatcggcgcttccgtaaaacattttgccgccaataacaaagagacaaacagaaagcacagcgattcccgtgtatccgaacgtgcccttcgtgagatttatctgaaacagtttgaaattatcgtaaaagaatccgatccgtggacgatcatgagctcctacaacgtgatcaacggtcacagagcttcggaaaataaagaacttctggaagatatccttcgcggagaatggggattccagggcatggttaccacagactggtggacccgtggtgagcattacaaagagatcaaagccggcaatgatgtcaagatggcaaccgggtatccggaacgtgtgaagaaggctatggaacttggtgaacttacccgtgctgatctggaacactgtgcaagacgtgtactggaactgatcctgaaaatcgattaaatataactaacagttacgattaatcaaaaaatatgcataaaaagtgagaaaaaaagcaaacagaaaaagaatctactttctgtttgcttttttttgcaaaaatataaaaggccatactggattactggaaaaaaacagggtatagtaataagaaaacagaacgtgtaagaggggtaacaaacgatgaacagaaagatagaaaatcctttcctctatgtagaagtcagtgaccgcggagcagaactgatgcggattatgagaaaggataccggtgcggagattctctggaatggggatccggctttctggagctaccggtctccgattcttttcccgaatgtgggaagtacctggcagaaaaaaatgaagatcaacggaaaggaatatcagacccgtcagcatggatttgccagagaaaaagaattcacttgtgtggaagaaggtacggaaaaacttcgctaccggttaatgtctgacgaagagacaagaaagtactatccatttgattttgtattatggatcacctatgaactgagagaaaaagaggttctcgtcagctgggaagtggaaaaccgatccggggaagtcatgagttttacgattggcggacatccgggcttccgttttgaaaaagaaggagaacagaaagaagactacgaactatattttccggaaaatacagagtttaccgctacagcagtcgatctggtcaacggtaccggaaaaccggatcagaaataccgggtgaaactgacagatcatacgctggtgttaagtgatcagctgtttgatgtggacacgctggtagttgacgatgcacagatccgggaagtatggctcagaagaaaagccaccgggcagctttatgcgggagtccgttgtatcgatgaattttgcagttttggaatctggtcccttccgaaaggaccgtatgtctgtctggaaccctgggcgggaagatgtgatgatgaagggttttgtgaagatatttcccaaaagccgggaatcaaccgggcgaagccgggagaatgctggaaaaagcagtatgcgattctgatcggatagaacagagtatcttaagaggtgtatttacaacagggaaaagagtgtcagatgtaagaatccggcacttttctgttatctgcagaagaaaaatagcagaggataaattttataattatagaaattacagggaggtttttgcatgggaagagcaatttatgtgagcagtgtaaacggagatgatgcaaacagcgggtatgcaccggagaaagcattccgcagtctgagaaaggtaaaccagatggagatccagccgggagatcagattcttctggagagaggatcagtatttgtcggagagtatctgcatctgtgcagagggggtacaaaggaggcaccggttgtggtagatgcgtacggagaaggtgcgctgccgcgcatcgagacggacggaaacgggatctggtatcagaactatggcggacatctggacaatgtagtacatacctggaaaggctatctgtcctcagcggttcttttatacgatgcagaatacatttccatccggaatctggaaattacaaacaacccatgcgtcaaaaatgagcgcctgaaccaggcagaccgtatgaaccgcaccggcgtatccgtgattgcgaagaatcacgggacgctccatgagatcgaactcgatcatctgtatatccatgatgtagagggaaatatctacgacaaacatctgaacaatggcggtatctatatgtcagtctcccgcccggatgacgaagaaaagaccggaatcgcccgttatgatggtatccatatccaccactgtaaagttgagaactgccgcagatggggaattgccgcaggctacacgtaccagcatgacaaatttaccacactggaactgcccgatgaagtggtgaaaacctacggctccaccaatgttgtgatcgaacacaactttgtcaaagatatcggcggagacggcatcacaccgatgtactgctttgaaccgctgatccagtacaatgtgtccgaaaatatcgctgtggacatccacccggatctgtacaacgaagaaggaaaccgtggcggtatgaccgcagccgccatctggccatggaaatgcaaaacagcgttgttccagtacaacgaagtctacaacactgtctataatcaggatggtcaggcgtgggatgccgactccggtgacggaacgatctaccagtacaactacagctgcaacaatggcggtggctgtgtgatgttttgtgagggcgagagcgtcaacaacatcttccgctacaacatcagtcagaatgacggaacaggcatcctgaccccggtacgaaacgtggacgcgaaaatctatggcaacatcttctatataaaagaaggcgtggactttatccgtcatcggatctggggcgatacaatgatcgaaggcggcggaatcgaagtcaccgacaacattatcatctacgccggaaacgcccccaaagaagagtcctggacctacaacagccccaaggcatattatcagagtaatacatatgtaaactatcagaataccccggaaggtgatccggctccaatctgcctctccgctgccaccgacatcctgacagctccgggcatcgccccggagaccaccaacggtagcagccgcatgtacaaaggcagtcaggactttgccggctaccgccagaaaaaagacggcacagaccttctgaaactgtaaacttcaggaacaaaagaacaagaagaaaggacacaaaattttcacaaaaaaattagcactcccccttgacgagtgctaatacaggtgttatagtacagatagaacaaaggaagagaaataaagaagttcaactaccggatgttctacacgaataatcaattaagcaatcactccgccaccgggcggaacaaatagaagggagaaatgacttatgttaatgcctagtatttttggtgagaattttatggatgatttctttggagttccggagagaacttatacacagagtgcgcagaacgccctgatgaaaaccgatgtagtagagaacaaagatggatttgacgtatccattgacctgccgggattcaaaaaagaagatgtgaagggagaagtcaaagacggctacctgatcattaccgcatcgaccaaacagaacaaagaagagaaaaacaaagacggcaagtacatccgcaaagaaagatacagtggaacctgtcagagaagcttttatgtaggagaagatatcaaccgggaagacatcaaagcaaaatttgaagatggtgtcctgaaactggagattccgaaaaaagaagcaaaaccggaagtaaaagaagcaaaatacatctctattgcataaaagagcagggagatgaaaattgagacaaaacacgtattacgagttttatccattcatgcggcaggcgcggaccgggcgtctgccggataaataaactgtgcgctcattactgtgaaatcgagtgaacagaaaaaggaaaataacagggttttaaaacccgttcactatagagattaccacagagggacaggacaaacttcatatccggagtctctcttttttatatatacaggcagcaagccgaatgtacaggatgtaacaagttcccaaaggaggtggaacaagtggaaaataaaagagattactatgaagtgcttggcgtaagcaaagaggcagacagttcggcaattaaaaaagcctaccggaaactggcgaaaaaatatcatccggacaccaacgccggtaatgcagaggcagaaaaacgattcaaagaaatctcggaagcctatgcagtactgggagatgaggaaaagaaaaaattatacgatgaattcggacatatcgccttcgagccgggattcaatgcggatgccgcaagagcacagaaacaatatggatatgaaaacttcggcagtgataacagccagaatggttatcgggagtaccattttaacggatcaggtggagatgacatcttcggagatctgtttggaaatatgtttcgccggggagcaaaaggcgggaatttccacagcggaggatttcataacgacagcggattctatcagcagttccatcagagagaaaatgatggcttctatggtaaacatggatttcacgaaacttattccggaaaaggggagaatctggaagcagagatttcacttacctttgatgaggctgtatttggctgcgacaagatgatcacattgcaggaagcaggaggtaaccgcactttgaaagtacatattcctgcgggaatcgataccggacagagcgttcgactgcgtggaaaaggtcatccgggaatcggaggcggtgaacctggcgatctgttgctgaaagcaaaggttggaagaaaaccgggatacgaacgaaaaggcgtcgatgtctacaccacggtcagtatcccatacacaaccgccgctctcggcggagaaaccagagtatccacattatacggggatgttagttgtaaaatcaaagaagggactcagtcgggcagcaagatccggctgcgtggaaaaggaattgtatctatgaaaaatccgaacgtccacggcgaccagtacgtcaccgtccagatccaggtaccccgccacttgaaccagcaggcacgccggaaactgatggaatacaaacaggcttgcggataaagaaagcagacaggaataactttgaacagttgttactgtctgctttttgcatgtgttgtgccgcatttcgggtgcgttccggtttgaaagcagaaaacagacaacgagagtctacgagatgcagtttacaaaacatcatttctgagctatcctatagaaagaaaaataataaaaagtaactatccagtagatagcataacggtgaagatactgaacagttgcgaaaagacaatcaggaggaagcaacatggtaggtccggaaggaacaaaacgaatatccaaaatagatacgtacctgaatgtagccgaagcatttgcctatcgaagcacctgcatcaaacgaaaatatggtgcggtgatcgtaaaagatgatgtggtaatctccaccggctataatggatccccgcgcggctacgacaattgctgcgatatcggcgagtgtccgagaatcaaactgggtatgcatcagggagaggggtacggtctttgccgtgcgatccatgctgagcagaatgcattgctgaactgttcccgcgaacagaccatcggtgccgacctctaccttgccggcatcaatccaggtgataattctgttcaccgcgcaaaaccctgccccatctgctcccgccttatcatccaggccggaatcaaaaacgtctacctccgcgtaggtgccaaagccggtgagtacgaagtggttccggccaaagatctggtgtggcatctgtaaaacaaaaatgataaccggaaaataaagacagaaaaagccgcaaggaaacagtcctggtcagtaaagttcaatgccccggaagcccgcgatccctcctcggtgcgcgcgaacttgtcgagtacgagtttgagactacaggctcaaaccgaacgcagacctgagcgcgcaccgaggagggatcgcgggcttccggggctcacaccatccccaacaaaccttactgcggaatccttgccttataataaagcggcgacagtccaaaatacttcttaaacaatttactgaaatgatacgcatcctcataccccacagccatcgccacagcctgaatcgactgctccgggttctcatccagcaattcccgcgctttttgcatccgcagactgatcagataattgatcggcgtatcccctgtctcactcttgaaaatctttgaaatataaaaagaactcagatacatatttgccgcaatctgatccagcgaaatcttctctttataatgtgtctccatataatgcatgatctgctgaaccacatacttcttatttaccgacttgaattcataccggggtgcatactgacgttttacatcttcctcaagttcctgtttctgatatctgcaaagcagacagatcacctgaatcagataggatttcagcataaaataccgccccggctggcaggtcttcgactcctgttccatcaggttacacagccgaaacaacggttctttataactgtccggcaatgttgccagcagctgataatttttaaaaagaggaaaatgccctctggtacatccggcaaattccacatttgaaaaagccagataaaattcccgggcagaagttccggctgcaggaaggctctggtgatatgttccgggattcagcaaaatcacggatccttcttccacatcatacaacttctcatctatacgaaatgttgtttttcctttcagtataagcacaaattcaataaaatcatgacaatgataattcatctcaggctctgttcgaagcagattacagcagaacagaaagcggggattgagatcattgtaagtaagatcatacaccgatggttccataaaaatccccctgtcataaatataatttcaacgtaactgttcagtaccttcacagttacgagccaaaatgcctcgcgggacagtggctactgaatagttacatttcaacacatatttgataagttaagtatacaacataaaccatccgatgcacaagaaagtacattccactttttcgactgtactttataataaaactatcgtaactgtgaagatactgaacagttacagtcatataaaaattggcagccggcggtaaaagatgccacatggtatgcaaaaaaaagaaaggatgaaaaaagaaaatgacaaaaagtatgacatcaggaaaaccggtaaaactaatccttttatttgcgcttccgctgattgtgggtaatatttttcaacagttttacagtatggcggataccgtaattgtaggacgtactataggagttaatgccctggcggctgtcggatgtacaggaagtgtatctttctttattctcggatttgttatgggatttacctcgggtttgtcgattctcattgcccagcgtttcggtgcggaggatgaggaaggaatccgttgcagctttgctgccggtatcattctaagtattgcactcacaattgtgatgacattttttgcagtggcactggttcgtcctgccatggaacttttgcagacaccggaggaaatccttgacgatgcggtttcttatatccggattatattctggggaatcggagcaagtgtattatttaatctgggatcaaatacgatgcgtgcattgggcgacagtcggacaccactgtattttctgatttttgcctgctgtgtcaatattgtactggacattgtactgattgccgtagtcggtatgggagttgcaggggcaggtgtggcaactatattttctcagctcctgtcaggaatttgctgctttgtatatatatggaagaaaatgccggtacttcggattaaccgccatcactttcatctggcgcaaaaacagctgggtgcgcatcttcgaatcgcttttccaatggcgtttcagatgtccatcattgcgatcggtgccctgattctacagtttgcgcttaacggtctgggcgcggtatccgtagcagcttatacggcggcacagaagattgattctattgcaaccatgccactgaattctcttggacaggcaatgactacgtatactgctcagaattatggtgccggccagtatgagagaataaaaaaaggagtgttccagtgtattctgatttctctgaccgtcagtgtcttgatgggccttatgaatatttttgcaggaagcaatctgtccgctgtgtttgtgggaagtggtgaacgggatgtcattgccttatccaaaacatatctggtcatcaacggatcctgttactgggtgttgggactgttatttatctatcgctttaccttgcagggacttggtaacggatgggtgcctacagtggcaggaattatggaactggtcatgcgtgcaacagcagctgttttgctggtagagcgtttaggatttgccggtgcaagttccgcaagcccgttggcatggatcggggcatgcattccgctgggaattgcatattatcttacaatccggcaaatggttcccaaacagccggagactactcctgtaaaagccatgtgagcctgaaagtcagcggcttttcctttacttcccgggctatgggaagtataataaaggaaactgagaaaacatggagggtattacctatggaactgttatttttggagccggtattcaaagaggctatctggggtggaacaaaattaagagactcgtttggatatgatattccaagtgacacaacaggagagtgctgggcgatcagtgctcataaaaatggtgactgtaagattgcaggtggcagatacgatggaagatatctgagccagttatgggaagaagagccggaactgtttggaaattatccgggcagccagtttccgcttctgattaaaatcattgatgcgaaaaatgatctgagtattcaggtacatcccgatgatgcatatgcatccgaacatgaaaatggttcgttggggaaaaccgagtgctggtatgtgctggactgtgagccgggtacaaaaattgttatcggccacaatgcaaaggataaaaaagaactggaagagatgatccgtcagggacggtgggatgaatttatccgtgtgacagatgtgaaaaaaggagattttttccagatcaatccgggatgtctgcatgcaatcaaaggaggtacagtgattctggagacacagcagaacagcgatattacatatcgtgtatatgactatgacagattgtccgacggaaaaccgagacagctgcatgtggaacagagcattgacacaattgtggcaccgtttgagccggcaaaatgcgatacctatactgagaacctgcagggggcggaacataaacatttgatcacctgtccattctattctgtagacaagtatgatgtggacggtgtatttactattgaatttgacaaatattttacggatgtcagcgtagtagaaggttccggtactgtaaatggaattccgctagaaaagggtcagcattttatcgtaccggcaggatacggaaagtgccgttttgaaggcgtgatgagtctgatctgttcgaatccggaaaaacattaagagaaaatccggacttaataaaaggaaattaaaaagttagacggaatatatataacagagataatctgagaacggtataaaaagctgttcaaaacacaggtaaaaaggagaatacagatatgagactgggagcactggaagcaggcggaaccaagatggtctgcgcaatcggaaacgaaaatggggagatttttgagaggatatctattcctaccgaaactccggagatcacacttccgaaactgattgaatattttaaagataaagagatcgaagcactgggaatcggctgctttggaccgattgatgtaaaccgtaactctgaaacctatggttatatcacgaccacaccaaagctggcgtgggcaaattgcgatattgtcggtgcttttaaaaaagcactgaatattccggtgggatttgatacggatgtaaatggatctgcactgggagaagccacctggggaatcaccaaaggcctggaaaacagcgtatatatcactattggaaccggtgtcggtatgggtattatgagcaacggaaaactgcttcatggtatgctgcatccggaagccggacatatcctgatgagaaaacatccggaagatcattacgaaggcaaatgcccatatcacaaaacctgtctggaaggtctggctgcaggcccggcgatcgaagcacgctggggcaaaaaaggaatagaactggcagataagaaagaagtatgggagctggaagcttattatatcggacaggctctggtagatctgattctggtactgtctccggaaaaaattattcttggtggcggtgttatgcatcaggaacatatgatgccgttagtcagagaagaagtaagaaaacagatggccggttatattaagacgaaacagatggatgatctggataattatattgtacttccaagcctgaatgataatcagggaattatgggtgcgctgaaactggcagtggatgagctggaactggagaaataatatccttatataaaataagaaaactgtcgtggggaatctgcgacagctttcttatttttacgtgaataacgagccacattcatatcttttacttgacttttttgttgacacatggtatagtaagtaagcgacatggaagtaggtcttttttttatgcctaaaatcgaaagacgtgaatttcgatggcaaaagaaaaaagtccgttgcaacaacgcaaatcaacacagtggaggtggaagtcgtgcgcgtaaaaatcacattggcatgtacagaatgtaaacagcggaattacaacatgacaaaagagaaaaagaatcatccggaaagactggagaccaaaaagtattgtaaattctgtagaacacacacaatgcacaaagagacgaaataagattgtcgtgtaagaggtgaggactatggcagaatctgcaaaaaaagaaaaggctccgaaaaaggagaaagctccgaaaaagagctggaccaaaggtctgaagtccgaatttgacaagattatctggactgacaagaaaacagtcggcaaacagacggttgccgttgttggtatcacagtagtcctgggcgtgattatttccgttctggacagtgcggttctggagttcgttaatttgctgattaaataaggacaagggtgaggaaatggcagaagcaaactggtatgtagcccatacatattcgggctatgaaaacaaagtgaaagccaacattgagaaaacaatcgaaaaccgacatctggaagatcagattctggaagttcgggtaccgatgcaggatgtgacagagttgaaaaacggtgcacagaagctggtatccagaaaaatgttcccgggatacgtactgatcaacatggtgatgaacgatgatacatggtatgttgttcgtaacacccgtggtgtgaccggattcgtcggaccgggatctaaaccggtgcctttgagcgaagaagagatcggcatgctgggtatccagcctgaaaccatcgaaatcgattttgcagaaggcgacagcgtagttgttaccggaggagcctggaaagatactactggtattatccagacgatcaacagtcagaagcagactgtgacaatcaatgttgagttgtttggtcgcgaaacaccggttgagatcagtttcgcagaaattaagaagttgtaaacagaatcatcgaagtatgaagtttcgcacggaaatgattcgtgggagggaaatccccgcaattaccacattataggaggtcattacaatggcaaagaaagtaacaggatatatcaaattacagattcctgctggtaaagcaacaccagcaccaccagttggaccggctctgggtcaacatggtgtaaatatcgtacagtttacaaaggaattcaatgctagaacagctgacaagggagatctgatcatccctgtagttatcactgtatacgcagacagaagtttcagctttataaccaaaactccaccagctgcagttttgctgaagaaagcttgtaacatcaaatcaggttcaggtgttccgaacaaaacaaaagtagctactatttccaaagataaagtaaaagagatcgctgaaatgaaaatgccagatctgaatgcagcaagcatcgaagcagctatgagcatgatcgctggtactgcaagaagtatgggtatcgtagttgaggactaatctttactaatgtaactttgagaccataaggtcacaaacaaacgaatatcgtgggagggcaatccccgcaattaccacaggaggttataggaaatgaaacacggtaaaaaatatatggaaactgccaaagcagttgatcgtgcaaaactgtatgatccggatgaagcaatcgctttagctaaaaaatctgcagttgcaaaatttgatgaaacaatcgaagctcatatcagaacaggctgtgacggacgtcacgctgaccagcagattcgtggtgcagtagttctgcctcacggaaccggtaaaactgttcgtgtcctggtattcgcaaaaggtgtgaaggctgatgaagctcaggcagctggcgcagaattcgttggagcagaagaactgatcccgaagatccagaacgaaggatggtttgactttgatgtagttgttgctacaccggatatgatgggtgttgttggtcgtctgggtcgtgtacttggaccgaaaggcttaatgccaaacccgaaagctggtacagtaacaatggacgttacaaaagctgttcaggatatcaaagctggtaagattgaatatcgtcttgataaaacaaatattattcacgtgccaatcggaaaagcttctttcacagaagaacagttagcggacaacttccagacgctgatgggtgcaatcaataaagcaaaaccttctacactgaaaggtcagttcctgagaagcgtaacaatcgctcctactatgggaattggtgttaagattaacccattaaaacttgtgtaatttataaaatgaaacactccggagaatttctccggagtgttttttgtacaatatagacaaaaatttatagttgcttttggagtgtctgcttatctttttatttccctcttgatttttgataacagttgtagtaatatccatgtatagcaaaaaagcaaacgtttgcgcaaacgttaaaatcacaaaaatattaaaataaggaggaggagatgaagcttttttacgaaccaaacaatgcatactttggagattgtatgccattttaccatgacgatacgttttatgtgtttcaccagagagatgcgagaaatccacgtccttttgaaccttttgaatggtctttggcaacgacaaaggattttgtccattatgaagataaaggagtagcaattccgaaagaaggagatgattctccggagcaatatattttcgcaggaagtgtttttgaaggcaatcataaatttcatgcaatttatactgcttataatcgggattttgctgcacagggaaaagatgcacaggttttgatgagtgcggaaagtgatgatcttctcaattggaaaaagactggtaagtttgttcttcctgcaccggaaggatatgatggcaatgactggagagatccatttattttatgggaggaagaaagccaacagtatattatgatattgggggcccgaaaattaaagggaaaacagatgagaaccggaagaactgtctggtttacatcaaaagatttgtcggaatggcattttgagggcgatttttgggcacctgaaacattcacgatgcatgaaatgccggatttgtttaaaatgggtgactggtggtatttacttaccacagaatacagtgaaagaagtaaaacaatctatcgtatgagccgttctttgaaaggtccctggattgctccggcggatgatgcctttgatggtcgggcctactatgctgcacgttcgtgttcggatggaaaacatcggtatctttttggatgggcagcaacaaaaactgataatcaggatatgaatagttgggattgggcaggaacttttgtgtgtcatgaaatctatcagcggccggatggaacgctgggtgtaaaacttccggattctatgctttcagcttatgagccggatacagaggttatgaaaggccctgctacacttgaaacagtagattctcaggcaaaccttcatattacagaaacacctgaagacttctataaagttgagatggattttcagatttccgagaataccagaatgtttggaattagattgttcgaagatccggaaaccggagattcttacaaatatgaagttaatctggcagaaaatagaatttattttgacagaacaccaaatcagccgtggtatcgctattttgacaagggattggaaagaccgattcatttagaagcaggaagaaaataccatgccagattgattgtggatgactctattgttataatgtatattgatggtgtttcgttaattgcccggatgcatgcaaaagctggatgtgacttaagcgcatatgtaattgatggctccctcaagattgaaaatattacaatagcaaaatcattaaggagttaagatctatgtctaatcgaacggtgaatttaaaagatgttgccgcaaaagccggtgtatccattacgactgtctctcatgtaataaataaaactcgattcgttaaacctgaaacaacagctgctgtagaaagtgcaataaaagaactaaattatgttcataatcttgcagccaaaactctgcggtcgaaaaaatccggaatcattggagttatgattactggatttggaaatccatattttctggaaattcttcagggtatagagcatattttaagcgaaaaagagtatcaaatgattcttgggaacattggaagctctatgggggcgcaggaaaaacaattggacatctttaattcgtggtgcgtagacgggattataacctatggtcagggataccaaaatttatctcaaaaatatgattctctgaattgccctgttgtctgcattgaatctccgggaggagatcaaacagataatgttattatagatgactgcgctctgataaaagaagcgattactgatatgattcaatgtggacatcaaaaaatcggttgtatttatggcgtttctgatgcatatacatcgattcagagaacaaacggatataaggaaggtcttttggctaataaaataaaagtagacgagaccattatcagatgtggacaatcgacattagaaggtggttatcgtgaaacaaattggcttctggagaatgctgagcttgatgcaatttttgtggaaaataatttgatgacacttggatgtgtaaaagcattatctgagcgtggagttgaaattcccaatcaaatcgcccttcttgggtatgatgatgatgactggagagatacggttgttataccgatcagttccatacagcctccacgatatgaaatgggagaaaaggccacccaacttttgttgcagaaaataaactatccaaaacgaagatccattacaatcaaactatctccagaattaataaaacgaaaatcttattgatatatgaaggaagattattctgtataaaaaatattatctatactcttgacaggtcttagaacggtttcttttgccggatgttcgaataaagaagccgataagagtaagtcaaatgaactggtgctttttaacgccaaaggtgaaaatgaagctgaatttgaagagatgtgcaaagcgtttacagaggaaactggcattccgacaaaatggttttctacgtgcaatggaacaaaccagtctttcaattgatcctgcatatattgggcatttaaaaggtgaggtggacatagaatccgtggtatcagtcatagaaaagatttttgtaccgaatcattttcctacagctattttttgctgtagtgatgaggtagccattgaattgatgtgttggcttatgcatcatggatacaaaataccggaagatgtttctgtactatcttttgatggcataccttatacagaaaagctgaatccttcaatgactacaatctgtcagccggtagaatttcaggcagaaagaatcataaatggaatgttatatctgctggatggaaaagagcgaaaaagtgatgatactggaaatgattacgtcttacagataagagacagcacaggagttccaagagaataaaagatggagatgggacgaaggaagttaaaaatcgtcaaagccagtaaaatcaatagattagggcttgacagaataggaggtatatgaatggaaaaagtgctatatgaagaattgtttccggatgagttcgccgagcgaataaaaaaaatgcctgtcgcatttttacctcttggtacattagagtggcatggacctcatatgccattaggagcagacggaatacagtcaaaggaattatttatcgagcttgcagggaaaatgggaggggtggtccttccaatgctatttgtagggccggatcgcgtgttcgatgatcgtggagaattattttacggaatggatattaatacaagtggcgctttaaaaagttatccggcgcaacgtttaactggtagcgcatattggctggatacagaattgtttaaaaagctgcttatgagcattgtggagcagctttcaagaactggagtaaaaatcattatcggacatggacacggaccatcaataaatgcttttgcaaatattgcagctgatgcccagaaaatgtatggagtgaaattgtatactgcatggagttttgctgagaatgaagaattaaaatttcaaaatgaccatgcgggggcaaatgaaacttcaattgtgatggcatttcgaccggatctggttgattttagccgtgtgaaagaagatgaaagtaatctgattggaattgccggtcggcatccggtgaaagaatcttctgcggagtatggaaaaaggatcaaagagtatacaatagaatgtatttatgcaggcttacgttcggaatatccacaattgtttgaagaataagcccttacaattccggaatgtgcgtttagaacttcaggtggttttaaaatttcttaacggggactgatgcggggacgcaagccttatttgatcaatcgaatattgtttatcattcccgtatgtcgggcatgatagccgatcttatgccggactattgacaatgaccttcaaccctattgttagcagctgcaaacattttactgatattccagggttaactaaggctgacagagatgatattcagattgactgtaattaatttgaaagtattttaaatactataaacatgacgaaacacagtggtggaaaaattgtgcaggaatgtagattttcgttcgcgttcgtacggtaggcgccagcagaatttatctgaaaaaagtagtatgggcggaaggaaaatttatatagaggcaacggaagattgacgaataagatgttgtctgagttattttcaagacctaaagggagggaaagagatgaaaagaaaaatagttgcagttttaacagcagctacgctcgcggttggtatgttagccggctgtggcggcggcggaagcaattctagttccggatcaacagatacaagcggaacagcagcatctgaaggtattactacagaggtaggaactcctcgttccgagacactgatcgttgagagttcgacgcctactgatacaccaggtcagttcaacagttacatgaccggtacccagatgggatttggtattcatcagttgatgagcgcacatctgtgggagatggataccgtaaaaggtgagcagtggggtgaaatcgctgacggtatgccggaatccaatgatgactttactgagtggacagtaaaagtacgtcagggtatcaaatggtccgatggtgaagatgtaacagcagatgatgtagtcttcactttcaacatgatcaaagacaatgacggaatcaatgtaagtgcagcaacaaacatgtacattgattccgtagaaaaagtagatgattacacagttctgtttaagatgaaagaatcattcccacgttttgcacagaaatatggtatcactgcatggggaactgattaccgtatcgttccggaacatatttattctcagcagtccgatgttactacattcaaagatgaagatcctgtagtagcaggtccttataccgtaaaagagtacgataaattaggtgactgggtactgtatgaactgcgtgatgactggcaggacagcacacttggtgttgcagaatctactcagtatgactatgcagacggagcaactcctccgaaatatgtatggttccgtacattcgcagattctaccacaaaacagatggctatgatcaacaacgaagttgacctgctgtgtgaagtaacactggaagagttccagacaatgaaagaatcgaatgacaagattaactgctggtacaatgacttcccatatgcaaacccagatgacccgggtgcaaaaggaatcgtattctccatgggtaaaggcgcaccttatgacaatgcagatttccgttggggtattgctttagcacttaatatcgatgagatttccatgaacacgttctccggtgccggacgtgcggctccgatcccgctgtttaacaatacacagttcctgcaggatacatacacaatcccgatgcaggattggctggaaaactttgaactggatcttggcgatggaacaacctttaaaccttacgacacaggttatgcaaaacgtatggctgagtctcttggcgttgaaggatccgatgaagaactgatcagcatgtttggtgcaggctggtggaaacacgacgaagaagctgctacaaaactgctggaaaaagccggtcttgaaaaagtaaacggcgtatggaactatgaaggcaaaccgttcaccttcgagatgagctatcttgctgatactgaattccaggcagcacgtggcgtacaggcagcttacaaccagctgacaaaattcggtttccagtgtacaatcacttccaaatcttctgcaacatgggatgtagacggtggaaagggtaactttgatatcgctggttactggatatccgctggtaccctgaaagatttctataccggaatcagtggttttgatgcaaatctgatcaaacctgttggcgagactggttccggacagggtctccgatggaaaaacgaaaaagctacagagattattcatgagcttgctaatacttctcctgacgatgaaaaatcttatgaattacatcaggaattcctgaaggaatgtgtaacagatatgcctaatatcaacttcctcgctggtacaaaattcgttccgaccaactcaacatattgggaaggttatccaaatgcggaaaatccgtatagtggtccatggtggtggtggagctgcttcaaatacatgctgccgaacatcactccgacacaggcttaattgctatatataataagtctttggaacaatagtaacatgatgaaaccaacagagatccggtagagggttctgttgaaatatcaaaagggacggagttgtaagaagatcttatgaccccgtcccttttaacgtaaacctgaatccgtgaacttcacggattcaggactttttttaaaaagtcggaaatgacctataaatcagccgaaatcatatctggaaaattctttgttttttgcgtaaaataaagataatgggcggtgattaggccgcagaaaataagtttggtgatactgcacttgttgtactgagtcgtttttccggagaaggatgggatcgttccagtgtggaatacaatggagaatttaacccgtggccggacgagaccagtatgccgaaactgtctgcggaagtgtatctggatggagatttttatctgactgcaggtgagaaaaaactgctggcgcaggtagaagaagtatatgataaaattgtagttgtattaaatatcggtggagtgatcgatctgtcctggatcaagagagatgataagatcggagctgctttatacggtggccagggaggcatggaaggcggaaccgcgatggcacaggtattgtgtggtctggtcaatccatccggtaaattggcagatacctttgctgcaagactggaagattatccgtccacggaaaacttccatgagtctgtagaatatgtggattatacggaagatcgtttagtatcggttctggtcaggattctgacgagattttacgtgcgcagatgaattcggaaaatccaccggcaatttatactttagccgctttaagagctttgccggaatggaaagaaagcggtcgggttttgaatctatcaactgttgaagatccggaatttcaggatattgtatcttctgttcctgatactatgcgtttaacagatggtgggccggaaagttatgggatcccttatggcgttgaaggaatcggttatatcgtaaataagaatatgcttagtgacttgttcgggtcagataacggagaattagtgcttactgagcttagtacctgttcgtgggattgattatcctatacacaggttttggtatcagtatgtctgtgtttatgatgacaggttacattaagagcattccaaaagatattgaagagtctgctgttattgacggtgcaaatattatgcaggccttcttttatatcatgctccctttgattaaacctatgactataacgattataattttgaatggtatgtggatatggaatgattatcttcttccgttcctggtgtttgaaacgtcggatttcaaaaccataacgcttgagatctattatgttaagatgacagccgggcaatatgtgagtccttgggagacgctttttccaagcgttctgattgcaatcctaccattgattgtaatatttttactttttcaaaagcattttgttaaaggtgttactgctggagcggtgaagagctgaaaataagttggttctctttgaagaggatgtgattacatttagatcacatcctcttttctgattataggtaatgcattcagataaatgaagaatttttctgcatacagtataagctctgttaaatgtaaagtgaaatataggtaactattcagtcgttaattaatatctctaggctgaactgtaacaaatatagtttaaaaaatagagaaaaactattgacaagccacaaccttgatggtattatacctaagtatcacgccgaagacagcaggtgccgtaaggcataagactaaaacgcctgccgaggaagtacattcttagtaaagaatcgaggtcctctttgtcgtgcacaaagaggtttttttataccttgcctcgggcagccagagcctgctcccatggaaggatggctgacggagtgcccgcaggtgtatatttggcggtacacaaaatctataaggaggtgcaccaatcatggcaaaagttgaactgaaaaaaccgatcgtagaagagatttccgcaaatatcgctgatgctcagggcgttgttctggtaaactacagtggtctgacagtagctcaggatactcagctgcgtaaggaattaagagaagctggcgttgtatacaaagtatacaaaaacacaatgatgaactttgcattccagggaactccgtgtgaagaactgtgcaaacatctggatggaacaaacgctctggctatctctaaagaagatgcaactgcccctgcaagaatccttgcgaaatttgcaaagacagctccgcagctggaactggtagcaggtgttgttgaaggtggttactatgaccaggctggaattaaagcactgtccgaagtaccttccagagaggaacttcttggaaaactgcttggaagcatccagtccccaatcgccaactttgctcgcgtcatcagccagatcgcagaagcaaaagaagcataagtttcttagcgaaggcaagctgaaagcgcagcctgaggttagaaacttagctgttcgacagcgcaaagcgatgtcgaacttcctagcagcgtaagctgcccaaaaaaaattaaaaaagaaaacaaaacttataattggaggtaaataaaaatggcaaaacttactacagctgaatttattgaagctatcaaagaactgtccgttctggaactgaacgaactggtaaaagcatgtgaagaagaatttggtgtatccgcagcagcaggtgttgttgtagcagcagcaggtgcagcagaagcagcagaagagaaagatgagtttgacgtagagctgacagaagttggtcctaacaaagttaaagttatcaaagttgttcgtgaagcaacaggtctgggactgaaagaagctaaagaagtagtagacggtgctccgaaagtaatcaaagaagcagctgcaaaagcagaagctgaagaaatcaaaacaaaactggaagctgaaggcgctaaagtaactctgaaataatcagattacagcatttagttgaaagatggagaacccggaagagctacaatgctcttccgggtttttgtaatgaaaaaataaaaaagattagaaaattgggttgacactcttgacaaactgtgatattgtaaaaaatgcactattatggcaagatatgcctactagtctaatcttaaaagcacgaaaaaggcatgagcagtaataaatcaaatacacaaggggtgaaacggtcaatggaaaaaaacagaatacgtcctattacaaacggtaaaagtatgcggatgagctaccagagacaaaaagaagttttggaaatgcccaacttgattgaggttcagaaagattcctataactggttccttgaggaaggtttaaaggaagtatttgctgatatctctccgatcactgattacagtggcaagttgagcttggaatttgtggactttactttgtgcgaggatgatgtgaaatattccatcgaggagtgcaaagaaagagacgcaacttatgcagcacctttaaaagtaaaggtgagattgtacaataaggaaaacgacgaaattaaagagcatgagattttcatgggagatttgccgttgatgacagcaaccggtaccttcgtaattaatggtgcagaacgagttattgtcagtcagttagtacgttcccctggtatttactatgcgattgctcatgacaaacttggtaaaagactgttttcttctaccgtaatcccgaacagaggagcatggctggaatatgaaacagattccaatgatgtcttctgggtacgtgtagacagaacaagaaaggttccgatttctgttctgattcgtgctttgggaaaaggaaccaacgcagagatcacagaactgtttggtgaggagccgaagattctggcaagctttaccaaagatacagcaacctgctatgaagaaggtctgttagagctgtataaaaaaattcgtccgggtgaaccgctggcagtagacagcgcaagaagcctgatcacaagcatgttctttgatccgaaacggtatgatctggctaaagtaggtagatataaattcaataaaaaactgcatctgaaaaaccgtatcagcggtcatgtactggctgaagacgtagtggatactaccacaggtgagatcctggcagaagcaggtacagaagtaacaaaagaactggcaacttctatccagaatgcggcagttccgtttgtgtggattcagacagaagaaagaaatgtaaaagttctgtccaacctgatggtagatctgaccgcacatgtagactgtaatccggaagaactgggtgttacagagctggtatattaccctgcactggaacagctgatggaagaatatgaagatgctgatgaactgaaagaagccatcaaacatcatattcatgatctgattccgaaacacattacagaagaagatatttttgcttctattaactataacttacatctggaatatggtctgggaaccgacgatgatatcgaccacttaggaaaccgtcgtatccgtgcggtcggagaattgctgcagaaccagtaccgtatcggtatgtcaagactggagcgtgttgttcgtgaaagaatgacaacacaggatccggagggtatttctccacagtctctgatcaacatcaaaccggtaaccgctgctgtaaaagaattcttcggttcttctcagctgtctcagttcatggatcagaacaacccgctgggtgagctgactcataagagacgtctgtccgcactgggacctggtggtctgtccagagaccgtgccggattcgaggttcgagatgtacactattcccattacggaagaatgtgtccggtagagactcctgagggacctaacatcggtctgatcaactctctggcatcttatgcaagaattaatgaatacggatttgtggaagctccatatcgtaagatcgacaaaacagatccgaagaatcctcgtgttacagacgaagttgtttatatgacagctgatgaggaagataattatcatgtagcacaggcgaacgaacctctggatgaagaaggacatttccttcataagaatgtatccggtcgttaccgtgaggagacacaggaatacgaaagaagaatgttcgattacatggacgtatctcctaagatggtattctctgtagctacagccctgatcccgttcctgcagaacgatgatgcgaaccgtgcgctgatgggatccaacatgcagcgtcaggctgtaccgctgatgattacagaagctcctgtagtcggaaccggtatcgaagccaaagctgccgtagactccggtgtttgtgtggttgccaagaaggcaggtaccattaccaagtctacatccaaagaaattacaatgaaaaacgatgacggtaccacagatgtataccgtctgaccaagttcctgagaagtaaccagtccaactgttacaatcagaaaccaatcgtattcaagaacgaacatgtagaagcaggtcaggtaatcgctgacggtccttctacttacaatggtgaacttgctcttggtaagaacccgctgatcggtttcatgacctgggaaggttataactacgaggatgcggttctgctgagtgagagactggtacaggaagatgtatatacttctattcatatcgaagaatatgaagcagagtccagagataccaagctgggaccggaagagatcacaaaagatgttccgggtgtcggtgatgatgctctgaaagatctggatgaacgtggtattatccgtatcggtgctgaggtccgtgcgggagatattctggttggtaaggtaactccgaagggagagactgaactgacagctgaggaacgtctgttacgtgctattttcggtgagaaagcaagagaagtacgtgatacttccctgaaggtaccacatggtgaatacggtattgttgtggatgcgaaagtatttacaagagaaaatggcgacgaactgtcacctggtgtaaatcaggctgttcgtatctacattgcacagaagagaaagatctctatcggtgataagatggccggtcgtcacggtaacaagggtgttgtttcccgtgttctgcctgtagaagatatgccattcctgccgaacggtcgtcctctggatatcgtgctgaatcctctgggtgtaccttcccgtatgaatatcggacaggtcctggagattcatctgagtctggccgcaaaggctcttggattcaacattgccactcctgtattcgatggcgcaagtgagaacgacatcatggatactctggaactggcaaatgattatgtaaatctgtcctgggaagagttttctgagaaacataaagaagagctgcttccggaagttatggattatctgtatgagaacagagatcacagaaatctgtggaaaggtgttccaatctcacgagatggtaaagtaagacttcgtgacggtcgtaccggtgaatatttcgacagtccggtaaccattggtcacatgcattatctgaagctgcatcacctggttgatgataagatccatgcacgttctaccggaccatactccctggtaacgcagcagcctctgggtggtaaagctcagttcggtggccagcgtttcggagagatggaggtatgggcactggaagcatacggtgcatcttatactctgcaggagatcctgacagtcaaatccgatgatgtgatcggtcgtgtgaagacatacgaagcgatcatcaaaggtgacaatatccctgaaccgggtattccggagtctttcaaggtattgctcaaagagctgcagtctctgggactggatgtaagagtcctgaaagatgataatacagaagtggaaatcatggaaaatatcgactatggcgatactgatctgcgttccatcatcgagggtgacaagcgatacaaccgcgatgaagaagagtcctacggaaactatggtttcagcaaacaggaattcgaaggcgaagaactggtggatgtagaagaagacgcagctgatgaatcagctgacgaagaattagatttctaagagaaaacattctctgatgcgatagaaaaagtcctgtggccgcgtaacagcggccgtgggaatgaatcctagaaaggagcaaccaaatggctgaaacaaccaataaagaagtatatcaaccaatgacgttcgatgcgattaaaattggtctggcatctccggaaaagatccgtgaatggtctcatggtgaagttaaaaaaccagaaaccatcaactaccgtacattaaaaccggaaaaagatggtctgttttgcgagagaatcttcggaccaagcaaagactgggagtgtcattgtggtaaatataaaaagatccgttataaaggggttgtctgcgaccgctgtggtgtagaagttacaaaatcaagcgttcgtagagagcgtatgggacatattgaactggcagcgccggtatctcatatctggtacttcaaaggaattccgtcccgtatgggtctgatcctggatctgtctccgagaacactggagagagttctgtattttgcgaattatattgtcctcgatccgggtgataccaatctgcagctgaaacaggtgctgacagagagagaataccaggaagcaagagaacagtttggagacaccttccgtgtaggtatgggcgcagaatctatcaaagagctgctgcaatccatagacctggaagcagaatccgtagaactgaaagccggactgaaagatgcaaccggacagaaacgtgcccgtatcatcaaacgtctggaagttgtagaagcattccgggaatccggtaacagaccagagtggatgatcatggatgttgtaccggttattccgccggatctgcgtcctatggtacagttggacggtggacgttttgctacatctgacctgaatgatctgtaccgtcgtatcatcaaccgtaacaaccgtctgaaaagactgctggagctgggagccccggatattatcgtaagaaatgaaaaacgtatgctgcaggaagctgtagatgcgctgatcgataacggtcgccgtggccgtccggtaaccggaccaggtaacagagctctgaaatctctgtccgatatgctgaaaggtaaatccggacgtttccgtcagaacctgctgggtaaacgagttgactactccggacgttccgtaatcgtcgttggaccggaactgaagatttatcagtgtggtctgccgaaagagatggcaatcgagctgtttaaaccgttcgttatgaaagaactggttgcaaacggaactgctcataacattaaaaatgcaaagaaaatggtcgagaaagtacagccggaagtatgggatgtactggaagacgttatcaaagagcatccggttatgctgaaccgtgctcctacattgcatcgtctgggtattcaggcatttgaaccgatcctggtagaaggtaaagcgatcaagctgcatcctctggtttgtaccgcgttcaatgccgatttcgatggcgaccagatggctgtccatcttccgctgtccgtagaagcacaggcagaatgccgtttcctgctgttgtctccgaacaacctgctgaaaccgtccgatggtggtccggtagccgttccttcacaggatatggtcctgggtatttattacctgacacaggaaagaccgggaagcaagggagaaggcggatactacaagagcctgaacgaagctatcctggcttacgaaaacggatacctgacactgcagacaagaattcacgttcgccgtgaaaaaactctgccgacaggagaagtcctggaaggaacagtagaatccactctgggtagattcctgttcaacgagatcctgccacaggatctgggatttgtagacagaagtgttccgggtaacgaactgcttctggaagttgatttccatgtaggaaagaaacagctgaaacagatccttgaaaaagttatcaatacccacggacagacaaagactgcggaagtactggatgatatcaaagctaccggttacaaatactctacgagagctgctatgaccgtatccatttccgatatgactgtgccgcctcagaaaccacagatgatcgaacaggcgcaggaaactgtagataaaatcaccagaaacttcaaacgtggtctgatcacagaagaagagcgttacaaagaagtcgtagaaacctggaaacagaccgatgatgagctgacaaaagccctgctgaatggtctggataaatataacaacatcttcatgatggccgattccggagcccgtggatctgataaacagatcaaacagctggccggtatgcgaggattgatggccgatacaaccggtcacaccatcgagctgcctatcaagtcaaacttccgtgaaggtcttgatgtactggaatatttcatgtccgcccatggagctcgaaaaggtatgtccgataccgcccttcgtaccgccgattccggttacctgaccagacgtctggtagatgtatctcaggagctggttgttcgtgagatggattgtgcggaaggcagagatgagattccgggtatgtatgtgaaggaattcacagacggaaaagaagaaatcgaaagtctgcaggaacgtatcacaggacgtttctcctgcgagacaatcaaagataaagatggtaatgtgcttgtaaaagcaaaccacatgatcacaccgaaacgtgcagctaagatcatgaacgaaggtgtcaatgcagaaggcaaaccttacgacaagatcaagatccgtacgattctgagctgtaaatgtaaagttggtatctgtgcaaaatgttatggtgcgaacatggcaacaggagaagctgttcaggttggtgagtctgtaggtatcatcgccgcacagtccatcggtgagcctggtacacagctgaccatgcgtactttccatagtggtggtgttgccggtggcgatatcacacagggtcttcctcgtgtcgaggagctgttcgaggcaagaaagccgaaaggacttgccattatcacagagattcctggtgaagttgcaatcaaagataccaagaagaaacgagaaatcgtaattaccgataaagaaagcggagaaaccaagacatacctgatcccttacggatccagaatcaaggttacagacggacagatgctggaagccggtgatgaactgacagaaggttctgttaacccacacgacattctgaaaatcaaaggtgtacgtgccgtacaggattatatgatccgtgaggtacagagagtataccgtctgcagggtgtagaaatcaacgataaacatatcgaggttatcgttcgtcagatgctgaaaaagatccgtatcgaagacaacggagatacagaacttcttccgggtacgatggttgatttccttgaatatgaagatatcaatgaaaagatggaagcagaaggaaaagctccggcggaaggaaaacaggttctgctgggtattaccaaagcttctctggcaaccgattcctttatgtcagcagcatccttccaggagacaacaaaagtcctgacagaagctgctatcaaaggaaaagttgaccacctggtaggtctgaaagaaaacgttatcatcggtaaactgattccggccggtactggtctgaagcgttacagcaacatcaaactttccacagatgatatgctgaaggaagaagaggacgatatcctgctggacgatgaagatctggaacttgtaccggaagatatcacagtagaggaagaagcttccgaaactgctgagacagatgaagaaacagatgaaatcgctgaagaactggtaactcttgaggatagcgaagagtaaaggtcactgatatcaggtaataatgagtaaataagtaaaaagtcaggggaaactgataaaaatcagtaatactcccttgactttttattttttcgatgctatgatactacaggtgcgcatggaaatgcagttattttgatgtgcgcaaaattaccttataaaaggtaagacggctgcatagtcgtatgatttagaaatagcaaccgcagaaccagaaaaggaataattacaggaggtgaaatggaatgccaacatttaaccagttagtaagaaaaggacgtcagacttctgttaagaaatctaccgctcctgctctgcagaaaagctttaactctttaagaaaaaaatccagcgatctgtcttctccacagaagagaggtgtgtgtacagctgttaaaactgctacacctaaaaaacctaactcagctcttcgtaagattgccagagtacgtctgtcaaacggaatcgaagtaacaagctacattccaggagaaggtcataaccttcaggaacatagcgttgttctgatccgtggaggccgtgttaaagacttacctggtacaagataccatatcatcagaggtactcttgataccgcaggtgtcgctaacagaaaacaggctcgttccaaatacggagctaaaagacctaaaaaataagatgaaaagctacgctacggctgcttagcggcatagcgaaacaaaattgacaatatcacaatactatgtacggtcattccatttataccctgatggttgcgggtgaaatagaggaatttaccagtgcgaacacatagtcgacagtacctgtttaactgctcaggctgtcatgtgagtacctaagagataatctattgattaaggagggaagtaacgtgccacgtaaaggacatactcagaaaagagacgtgttagcagatccgatgtacaacaacaaagtggttaccaaacttatcaataacatcatgttagacggtaagaaaggtgtagcacagaagattgtatacggcgctttcgctaaaattgaagaaaaagctggaaaaccagctatcgaagtttttgaagaagctatgaacaacatcatgcctgtactggaagtaaaggctagacgtatcggtggagctacctatcaggtacctatcgaggttcgtccggaaagacgtcaggctttggctcttcgttggttaactctgtattctcgtaaaagaggagagaagaccatggaagacagactggcaaatgagcttctggatgctatgaacaacaccggtgcatctgttaagaagaaagaagacatgcataaaatggcagaagctaataaggcatttgctcattacagattctaaaggaggaaatccaattggctggaagagaatatccattagagagaaccagaaatattggtattatggcgcatatcgatgctggtaagaccactctgacagagcgtatcttatattacaccggtgtaaactataaaatcggagatacacatgaaggtactgctaccatggactggatggaacaggagcaggaaagaggtatcaccattacttccgcagctaccacatgtcactggactctggaagaacagacaaaaccgaaaaaaggtgctctggaacatcgtatcaacatcattgataccccaggtcacgtagactttactgtagaggtagagcgttccctgcgtgtactggacggtgctgttggtgtgttctgtgcaaaaggtggtgtagaaccacagtctgaaaacgtatggcgtcaggctgacacatacaatgtacctcgtatggcattcatcaacaagatggatatcctgggtgcagacttctacaacgctgtagatcagattaaaacaagattaggaaaaaatgcaatttgtcttcagctgccaatcggtaaagaagatgaattccagggaatcattgacctgttcgagatgaaagcttacatctacaacgatgataagggtgatgatatctctgtagtagatattccggaagatatgcaggacgaagcagaactgtatcatacagaactggtagagaaaatctgcgagttggatgatgatctgatgatggaatatctggaaggtgaagaaccttctatagaagcaatgaaagcagcactgagaaaaggtacctgcgagtgtacagctgttccggtttgctgcggatctgcttacaaaaacaaaggagttcagaaacttctggatgctatcctggagttcatgccggctcctacagacattccgcctatcaacggaactgatctggatggaaacgaagtagttcgtcattcttctgatgatgaaccgttctccgcactggtatttaaaatcatgactgacccgttcgttggtaaactggcatacttccgtgtatactcaggaaccatgaactccggttcttatgtattaaatgctacaaaagataaaaaagaacgtgtaggacgtatcctgcagatgcacgctaacaaacgtcaggagctggataaagtttactccggagatatcgcagcagcgatcggattcaagtttagtactaccggtgataccatctgtgatgatcagcatccggtaatcctggagtccatggaattcccggaaccggttatcgagctggctatcgagcctaagacaaaagccggacagggtaaactgggtgaagctctggcaaaactggcagaggaagatcctactttccgtgctcataccgatcaggaaactggtcagacaatcatcgcaggtatgggtgagctgcatctggatatcatcgttgaccgtctgctgagagaattcaaggtagaggctaacgttggtgctcctcaggttgcatacaaagagaccatcacaaaaccggttgacgttgagcataaatatgcaaaacagtccggtggacgtggacagtatggtcactgtaaagttaaatttgagccaatggatgctaacgcagaagaaacttacaaattcgaatctactgtagttggtggtgctattccgaaggaatacattccggcagtaggcgaaggtatcgaagaagctatgaaatccggtattctgggtggcttcccggtagtaggtgttcatgcaaacgtatacgatggttcttatcatgaagtcgattcttctgaaatggcattccacattgccggatctatggcattcaaggaagcaatgcagaaagcatctcctgtactgctggagcctatcatgaaagtcgaagttactactccggaagattacatgggtgatgttatcggtgatatcaactcccgccgtggtcgtatcgaaggtatggaagatatcggtggtggaaaaatgatccgtggatatgttccgctggctgaaatgttcggttacgcaacagaccttcgttccagaactcagggacgtggtaactactccatgttctttgaaaaatatgaaccggttccgaagtccgttcaggaaaaagttctgtcttcaaaggctaaataataacgccttactatcaggcgcccgtaattgctgaaattatggaaatatgacttgcaaatatccttgatttgcaatataatcaaggatagcaggtctaataatatagtaaattaaaattttgccgtaaggcgcaagttttaaggaggaaaattaataatggctaaagctaaatttgaaagaagcaaaccacattgtaacattggtaccattggacacgttgaccatggtaaaactactctgactgcagctattacaaaaactctgcacgaaagactgggtacaggtgaagctgtagcattcgaaaatatcgataaagctccagaagaaagagaacgtggaatcacaatctctactgctcacgttgagtatgaaacaaaaaaacgtcactacgcacacgttgactgcccaggccatgctgactacgttaaaaacatgatcactggtgctgctcagatggatggtgctatcctggttgtagctgctaccgatggtgttatggctcagacaaaagagcacatcctgctgtctcgtcaggtaggtgttccttacatcgttgtattcatgaacaaatgtgatatggtagacgatgaagaacttctggaactggtagacatggaaatccgtgagctgctgaacgagtacgaattcccgggagatgacactccgattatccagggatctgctctgaaagctctggaagatccgaacagcgaatggggagacaaaatcctggaactgatggatgctgtagacagctacattccggatcctcagcgtgacactgacaaaccgttcctgatgcctgtagaggacgtattcacaatcactggtcgtggtactgttgctactggtagagtagagcgtggtgttctgcatctgaacgacgaagttgaaatcctgggtgttaaagaagacgttaagaaaacagttgtaactggtatcgaaatgttccgtaaactgctggatgaagcacaggctggtgataacatcggtgctctgctgcgtggtgttcagagaacagaaatcgttcgtggacaggttctggctaaaccaggttctgtaacatgccacaaaaaattcacagctcaggtttacgttctgacaaaagatgaaggtggacgtcatactccgttcttcaacaactatcgtccgcagttctacttcagaacaactgacgtaacaggtgttatcagcctgccagaaggtacagaaatgtgcatgcctggtgataacgtagaaatgacaatcgaactgatccatccgatcgctatggaacagggtctgactttcgctatccgtgaaggtggacgtactgtaggatcaggccgtgttgcttctatcatcgagtaatcactgattagcagataaaattatatatatcgttatcgtaagataacattgtgtccaaacgtaagataccccggaaccgcaaggtttccggggtttttctgtactctaagaaaagaaatgttcgtaaatttatcagattagaaacagtgaaatgtttatcagcaagatgaaatacggataaatttaaaattgaaaaataaggcatgcggtgccaaaacggtgccaaaaagaaactcctgcgaatgtttgctattatggcaagttacaattatatgatgagtgctgatgaagtggcacaggatcgttcatttacacttttgtatatattggaatagcactttagaaaacactatggtaaaataaagtgaagaaaaatcggaattgacagaggtaatgaactagagcgtgtctgaaaaatcatttccgcaatctgcaagccccactttgcggtatattttaccctcatccggttgccgtagcccgctacgccgccctcattcggataaaatctcccacaaactgagactcgcaactcacgaaaagcctttttcagacacgctctaggtcttaacgaagaggagaaatagttaacaaagagaggtgcatatgctatgccaggtatactcgtggttgaagatgatgaaaatttaaatcgtggaattacattttcactgaaaaaatccggatatgaggttttttcagcagaatcagtgaaaaaagcgaaaagaattgcaagtgataataatgtggatgttaccatttgtgatgtgaatcttccggatgggaatggactggaatttgtaaggtggatgagatgcaattataatacatacattatttgtcttacagcactagatcaggagatggatcaggtcatgggatatgaagcaggggcagatgattatattacaaagccgtttagtctttcgatacttcttttgaaaatagaagcacatttccgtcgcagacaggagaaaacggaagccggaaagatgatttcgggagatatcgtatttatcgcaggagaaatgaaagtcctgataaagagtcgtgaaatcagtctgacaaaaacggagttgaaaatgctgactttttttctgcagaatccgaaacagattctttcaaaaacacaaatattggaaaatgtgtttgatctggaaggggattttgtggatgaaaatacaatcgctgtcaatatcagaagactccgtgagaaaatcgaagacaatccggctgcaccggtctatataaagaatatcagaggtcttgggtatatatggaatcagggggtaaggcagtgacaaagagatatcgcaagaagatcacagtagcgctctccttggttttgcctgtcatagtattgtttgcaatattaaattgctttaccacgtatgtgttttatgaagattataaatataaaatgaatcttatgacagagattgctgcaaaggaagaattttccgggctggatgctgtttcggaattgcttaaggataaggatattgaaactaacgaacagggaaggcgattattggagcaatatggatactgggggaataaagggaatgcattttattcacaattccggcatcaggttatggtgaccggtgctgtaagcactgtgatatgcgttcttcttttgacttttttactttattggaagaaaaaagaagatgcgtgtcatcagaaaattttagaccaattggaagaaattctgatcagattccgtgaaaataaatttgatgatttactgaaaacggaaaatcatgcagaactggaaaaattgaatgaccagcttgaagcaatcggacatcatattcagttgataaaggaagaagcaagggcagaaaaggagaacacgaaagaaatggtttctgatatttctcaccagttaaagacaccggttgcagctttggatacatgttttagtgtgctgatgcagaatgacttaagtgccacagaacaggaggagtttcgtatccgttgtcggagtgctctggatggactggagacattattgcagtcgcttcttgaaatatccaagatggaaactggactgattcagattaataagaaaaaacttccgcttatggatactgtcatatctgctgtgaaccgcacttatcctaaagcggatgagaaagaaattgaattcgtttttgactatgaaaaagagctggaaacatgcacgattatgcaggataaaaggtggcttggtgaagctgtgatcaacgttctggataatgcaatcaagtacagtccgtgtggttcaaaaatatttatccggttacaaaaaagaaacgatcttgtaagaatggaaattgaggatcagggaattggtattccgcagaatgagtatcacaaaatttttcaacgattttacagaggaagttccaaggaggtcatggaaaagagtggtacaggaatcggactttttctatcgagagaaattatcgaaaaacacgcaggtacgattacggtaacctccggcaaaaagaaaaaaggaagcacatttgtgattcaattaccatatgttggttaaattttaagtgagcagaaatcttacaattctgtaagatttctgctcgttttttgaaagtgaaatgaaagattgtcctgatacaatttggatgtaggttgaaaaatgaccaaatatataaacaggcaaagaaagcgtgctgaaaaggtacgctttacagaattaaaaaggaggcaacacatgagtgtgatattagaaaccaagcagctttgtaagttttatggcgcaggtgagaatcaggtcaaagcggtcaatcaggtggacattcagattgagcagggagaatttgtcgcaattgtcggaaagtcaggttccggtaaaagtacattacttcatatgcttggagggctagacaccccgacaaaaggcagtgttactttagcagggaaagatttatacaggatgaaggaagatgcccttgctgttttccgcagaagaaaaatcggatttgtttttcaggcatttaatctggtttcatctgttaatgtctgggaaaatattgtactgccactggggctggatggaagaaaagtggatgaagcgtatgtaaatgatattattgcaactctggggattgaaaaccggatttataatctgccaaatcagttatccggaggacagcagcagagagtagcaattgcaagagcactggtgaatcgtccggaaattatatttgcagatgagccgacaggaaatcttgattctaagaccagtgatgaggtaatcgctctgcttaagatgacagcaaaaaaatatggacagacaattgtaatgattacccatgatgacgaaattgcacaggtcgctgaccgtattctggtgattgaggacggacaggtggtggatttcagatgaagacaataagcaggattgcatatagcaatgacaaaaggaacaggacaagaagtatactgatcatgatggcaatctgtctgaccacgatgctgcttgttatcatcagtactgtgggaaatggggtaattcatttacagaaaagtcaggcggcaggatcatatggaagcaattatggtctgtttgtttccgcagacggatcgcagttaaaagaagtaaaccgccgtgcggaaatagatgctacaggcactatgtgcaccgaaggtatcataaaaggcaatgaaaaaggcggttttgtctgcatggatgagactgcaagaaaaatgcttccttataataaagaatatgagttgaaggaaggaaagtatccggaaaaaatgcaggaaattgccgcaggaagagcattttttcgtgcaatggggtatggtgatgtaaagatcggagatacggttacactggattaccgcgcagggatgcagtcagaatataagccggaagaatttgttgtcagcggaatcctatatgatcgggatgagtataccatcgaggcgtcttatgttgctttcgggtcacagaagttttatgatgagcacgtcgcagagaatgacagacagtataatatttattttactttaaatgattctgcaaatgtgtctatgaataatatagattcggttataaagcagattgcagcagcttgtgggatcgaagaaaaaaacgttatagtcaatgatctctatttgcaatgggtcttgcagccgagttatgaaacgattgcggtatgcggggttttgattcttgcaattgtacttttctctgttgtggtcatttataatatttttcaggtcggtattgccaacaagatacaggagtatggaaaaatcaaggctctgggagcgacaaaaaagcagatgaaacaactgatcttcagagagggcatttttttgacatttttttcaataccagttggattgctttttggctttctgattgcaaaatgcggttttaactggctggtagaacaggggaaccttgtatcaaccggaactggctctatgggagttcaaaatcagcaggtgcctctgttttccctgcctgttatgcttctctgtattttcgtatcatttcttaccgttgctttggcactgcgtaaaccaatgaaaattgtttcacggatttcacctatcgaagcaacacggtatttagaaaatgcagaaacacaaaaaaaaggaaaacgaaatggtagaaaaaatgtcaccgtgttttctatggcaatggcaaatgtaacgggtaatcccaaaagaactattggtactatcctcacaatgggtttttcttgcgtattgtttgtgattatctctaattatgtgggaaatattgacacggagcatgaagcacgtctttccgttaatcatggacaatttgaactgcagcttgactattctgctgagtatgatgaaagatatccggagaataatctggatacgattctgacggatgatccattgaatgattcgctgattgaagaaatcaaaagcattccgggagtaacagatgtcatgacgagagagattgtctctgtaaatctgaacggaacaagatttccggctactattgtgagtaaaaaggattttgattttatgcgccaagaaggggatattggctctatggactatgatcaggcggtaaagaatggtgatattttctttggctggtcaacgtggatggaacaagatggatatgctccgggtgaatccattgcatttgactttgagaatggaagtggaacctatacctatcagggaaagattgcaggatcttttgtaagtgcggacacttatcttgtcattccggaaggtgtatatcgttccatgaatccgaggggaacagcctatggctatctgtgggtggactgtgataaaaaagatgtggcatctgtagaacaaagtctgaatactttgatttctaatacttcgcatataaaaatggatacttatcatgcgcagttacaatctgccgaatttgcaagcagcatgatgaagcttggctgttatctgtttatggctattgtaggactcatcgggtttatgaatatggcgaataccatgatcatgaatattacgacaaaaaagcaggaatatggtgtattacaggctgtgggtatgaccaataaacaattaaatttatgcctgcagttacagggactgatgtttacggttggtaccatatgcgtagctttgattattggtctgccgctcggctatgcacttttttcctatgcaaaacataatggaatatttggaatgaatatctatcatgttccaatcgtaccaatttttattatgatttttttggtcggtctgttgcagattgtactttcctgtgttttaagcagtaatctgaaaaaggaaacgctggtagaaagaataaggtatcagggatagcaagataacattgtgtccaaacgtaagataccccggaaccgcaaggtttccggggtttttctgtatggggaaaagttctggaattttctgtttcttatcgtgaagatctgtactataatagactggaaaaaataagcaggagaacttagaaatgatgaatctaaaaacagattataaaagtatcatcaaagagacaagtatattaacggttgcggtagccattattgccgccgcggtttatttctttcttgtaccgagccatgcttccgtgagcagcatatcaggtcttggtattgtgctttcgaattttattcctctaccgttgtcggcgattacgatgattttgaatgtggtcttgctgattatcggatttttcacctgtggaagagagtttggggtgaaaacagtatataccagtgtgatgcttccactgtttctgggtgtgtttgaggggatttttccggattttgactcgatgacgaacagccaggagctggatgtgctgtgttatattctggtagtcagtgtgggactgagtatattatttaatcgcaatgcatcttccggcggattggatattgtggcgaagattatgaacaaatatctgcacatggatctgggaaaagcgatgtcgttgtccgggatgtgcgtggcactgtctgcggcgcttgtgtacgataaaaagacggtggtactgagcgtacttggaacatattttaacggattggtgctggatcactttatttttgatcataacatcaaacggagagtctgcatcatcacgaagaaagaagaggagctgcgccagtttatcattcacgatctgcacagtggtgcgacgatctatgagtcgatcggagtctataatatggaaaaaagaaacgagattattacgattgtagataaaggcgagtaccagaaactgatgaactacatgaaccgtgaagatccgaaggcatttattacggtatatacggtgtcggatatgaggtatcaaccgaaaaggtgatgaaagaaaaaaatcgtcaaaaagtttacaaagcaaaacgggaaaactagagcgttttatgcaaactgtggagtgtcatcatgtatgcctgggaataaacaaagcggaatgaaggaagaaccggcagaaaatacgaagaagagaggaaatatgaaaatgaaaacagaactgcaaaaacagttatttgcattgcaggatcctggatatcgggaatttcatgccagactgattccgggaattccgaaagaagatattattggaatccgcatgccggtgttgcggaagttcgccggggaatttgccagagatcacagccaggaagccgaggtgtttttaaaagaactgccacatcgctattatgaagaaaacaatctgcatatgctgctggtaacaaagatcaaagattacccggaatgtctgcggaaagtgaaggagtttcttccatatataaataactgggcaacgtgcgatctgccggcgcccaaatgcttcgaagaataccgggaggaattacttccggttattcgagagtggttgctgacaacagatacttatacgatccggtatggaatcgggctgttgatgcggctgtatctggacgatatgtacagaccggaatatgctgatctgattgcaagggtacggtcggaagaatattatgtaaacatgatgattgcctggtattttgcgacagcgcttgcgaagcagtgggatacggtgattccatatctggaagaacggaaactggatcgctgggtgcatcagaagacgattcagaaagcggtggagagctttcgaatcacaccggagcagaaagtatatttgaagagtttacgttatccaaggaaataaaaacaggaagaatatcgaaaagtatcaaaacatatagaaagttacaggaacaaagagagaaatataactggaagatgcggaagcggtacatagagataactgtagaatagcaaaacagggatgtaaaaaaacagaatccgctaaataataacagagcagattcatatgaaaggaagcgaaacaatgtcaacatctatgacaaaggggaacccgttaaaactgatgcttcagtttgcacttccccttttaatcggaaatttattgcaacagacgtataatattatagatgcggcgatcgtaggacagattcttggggcgaaagcgttggcaagtgtgggagcaagcagcagtgtacagtttctggttctgggattctgtatgggatgctgtaccggattcggtgtaccggttgccaagtactttggggcagacaagatggatacgatgagaaattatgtatttaacggtgcggtactgactgggggaatcggtgtgacagtgacggttctttgttctgtattctgtccacagatcctgcatctgctgtcagttcccgaggatatcttccgtggagcctatcactatctgctgattatttttctgggaattccatttaccttattatacaattatttatccagtattctccgttctctgggagacagccggacaccctttctctttctggcattttcagcgatattgaatatctttcttgatctgttctgtatcgtggtactgaaatggggatgtgcgggagctgccgctgcgacaattacagcacaggcgatcagtggcatactgtgtcttgtttttattggaagaaagatggatgtactgcatctgacaaaagaaaacagaatggtaaatataactgcggtaaaagaacttctggcgatggggcttcctaccggactgcagttttccatcactgcaattggcagtatggtaatgcagtcggcaaataacggactgggaagtgtgtgtgtttccggatttaccgcgggcatgagaatcaaacagtttgcgatgtgcccgtttgatgcaattgctacttcggcatctgtattttgcagccagaatatgggcgcaaggcagccggaacgaatcaagaagggactgcggcagggagttgcgattgcaacgatatatggtctgctgatcgggctggtgctgatcttcggaggacgcacgctgtcgatgatctttgtgaaaaaatcagcagcggatgtcttggatgcatcaggaaaatatctgcggtgtcttggatatttcttctggagtctcggtatcctgaatgtgagccgtatggtgacacagggacttggatattcaggaagagcagtactttccggtgtgacggagatgctggcaagaacgattgtcagtctgggatttgtcggagccctggggtatacggcaatctgcttcgcggatcaggcggcatggatcgcagcatgctgttacatagcaccgacctgcctgcactgtgtcaaaaaggtgacggggatactggaaggtaacggcaaccgataaaaagagcgagaagataaaagcaatatttagttatagaaatagcctatagctggatattgcttttttctattagacaaagtcaggaaaattgtatatgataataagaacataaaaacatagcgaaataataggattataaaaacaacgaatataggtatgattcagcagatcatgttctgcgaaggtactgaacagttacgtagatattaaaaagaaagaagatgacagaatgaaacagattttgtgttttggagattcgaacacctggggatatgacggagagagcggggagcggctgccatttacagtacggtggacaggaagattgcagaaggcctatgaaggaaaagatgtccgtattatcgaggaaggactctgcggaagaacgacagtgtttgaagatccgttccgacagggacggagaggcacagcactgttgccgacattactggaaacacatcatccggtggatctggtggtgcttatgttggggaccaatgattgcaaaacgatctttggcgcatcggcagaagtgatcggaagaggaatccagtgtctgctggatcagattcagacctttgcacctcagacagatgttctgctgatctcaccgatctatctcggagaaaaagtatggcaggaaggatatgatcaggacttttcgccacagtcagtgacggtgtcgaaggaactggaaacagtatatgaacgaatcgctgcagaaagacagatcggatatttgcgggcttctgattatgtgcagtgcagcgaggcagatcaggaacatctgaatgcacagggacatcagatcttcgcacaggcagtgtatgaaaaaaccgagcggatgctgtggaagagaagtggctggagacaggtggtgtagaaagtggaaaacggcaggtaatccgtggtcaatcatgaacaccaggtgaactatgatgtatgagttctggctgattccgaaacgtgatagtcataagtacagctacaatctgtaaactttgaaagatgagtggcatgaaaggcataaacgaaaagcagatatgaacagaaagttccagagttgaaatgagtgtaaaagcagatttcaaccctgaaactttctattggtatctgtatttgtttcagtggaatattctgtcagcggacaaaaatatttttgcagatcgtcgtatttctcagactattgtcctttcctgcgcagaatttaaaatctttgctgcaaaattacgaggcgcctcggaaataatattgtgagtcagatatgccatgtgctccggagtatcgtcggaatcaccggtgagccagcatttgatcattcccacgcagccgttgatgcagaaagcgtaggcgtatttgatgtcgttgacattctgtgggaacatcgtaaaaagttccggcaaaacagcgtcctcgaccagtttttcaatcttttccacaaaagccatatcgccgttcggtcccattagtgccgcacagatatccttgttggcagccagaatccgaaacagctggatggcaaaagaatacccttcttctttcattcccggatccagcggatgctctttgatggcttccagaatatcttccatcagttcgccctctatgctctgaagcatctggtaaatgtctgtgtaatgcagataaaaagtggaacggttgatatcaatctcatccaccagttcttttaccgtgatttctttaatatttttctgctgcatcagtctggcaagaccggcgcgaagctgtgcacgggtttttcgcacccggcgatccattttttctccttttttcgtttccataaaaatcccccttttattgcatctcccgtattttctcaaggagttttttcaggtcgagaaaacttcccgggaagatttaaaatcatatctgaagaaaatataaacaaaaattcctgaaatttattagaaatttttaagaatttcaaatagacatatgcaatataaaatgtccagtaataaacgattgaaaagaaatgtgatgcttgtatctcttatctttctttagtataatacattccgaaaagaaaatcaacatattgtcgactaatagctttttaatctattaatagaataaaaagtgaataatagaatacacatctattaataggaaaaagtcgacaaatacatcaaaaaggaagggatacaatgctaaaacaagagtggaaaagtttatttcacaacaagattttgcttttagtagtcatcgtaattgcgctgatccctgcgatttacgcggggcttttcctggcatccatgtgggatccctacggaaatgtggataaacttccagtagccatcgtcaatgaagatgagccagccgagtacggagatactacactgacagttggagatcaactggtggataatctgaaagaaaatgattcactggcattcaactttgtagacgcagatgtggcaaaggaaggtctgaaaaatggtacttattacatggtaattaccattccgaagaatttctctgccaatgcggcaacggtcatggatgatcagccggaaaaaatgatcctgaattatgagacgaatccgggaaccaattacattgcttccaagttaagtgaaacggctctgggcaagattaaaacaagcatccgtgaggaagtaaccaaaacctatgcggaagctatttttgatcagattggaaccgccggagacggtatgcaggaagcagccgacggggcaaaaaagatcaaagacggtatggacgatgcatctgatggtaataagaaaatcacagataacctgaaagttctggcagacagtaccctgactttcaaagagggatctgaggaactgaccgaaggactgaaatcatataccgacggtgttgcacaggtcaatgacggagcaaaacagctggatgacggtgtcagcacattgaccgcaagtcttccgacactgactaacggtgtggatcggctgaactccggtgtgaaagaatacaccgatggcgtagcaaccctgaacagcaactccgaggcactgaactccggaagtaaacagctggcagagggaagtgagcagctgaaagaaggagccgcaaccctgaacagtggaacacagacctatgtagccggtgtgaatcagttgtccggcggtctgcttggtgtcaatggcgccaacggatatattaccggtgtgaattctctgaccacaggacttctgggaagtgatcagagtgcaggttatatcgacggtgtggaacagctggcgacaggagcaaaacaactgtccggtctgaccggtatcggtcaggtatatgccggaatcgtgaatctgaacaatgcagtatccggagttaacacagaaggaacactgcagaatggaaccgccgctttaaaagcaggtatcaaacagattcaggatcaggtatctgccttacagaataccaccagtgcagaaggcttaaagaagctgagcgcaggactttccagtgcaaaaacaggtatggaaaatgcaagtgcagcatccacaaaagcggctgagatttccggtcaggtggaaagtagcatcgaagcattgcctggacagttatctactgcattgggaagttacatggatgtggtaaatgcagctgttgcagatggaaacagtaaaatcgcaaaagcgaacgaacagattacagctacaaatgataaactgaaaaatgtacagtctgtagcggatcagctgacagcactcagtgcaaaagcagcagaagacggaaccgtacaggtacccgcagagacattaaagagtctggcaaatacattaagcagtgcacagggcggtgcaagtaccgtggattctgtaagcgcagatacctacactgcaaaagcagcagcagtcacaaaaggaattaacgatcagctgagtgcaagccagacatcactgaacactgcaaaagccggactggaaaaaattgcttccggactgaatgacggagcaaaacagcttgcagacggagcttctgcaatcccatctgatatcccgtcgaagccggtgcaggcactttccgacggactggctcaggtatatgcaggagccacaaaggtagataccggtgtcggtcaggtggcagcaggtctgacacagctgcaaacttctacagcatctttcccggcagcagccaagggtgttgcagcactgaatgcaggatttgaaaaactgacagcaaatgatgcgacactgaaagccggagcaacacagctgcagcaggcaggaactaccgtagtagccggagcaacacagcttcttgcaaatggttcagccctgacagccggaactgcacaggcagcagccggaaccgaaactctggcagccggtgctcagacattaactaccggccttgcaacatataccgccggtgtatccactctgaacaataacagcgcagcactgacaagcggaacacagcagcttgccgatggtgcgaagacactgggaagcggagccaccacactggcaaatggtacatccaccttatataatggaacaaaaactttagtagcaaacaacagcaaattaaacagcggtgccgcacagcttaccgatggcgccggtcagatccgggatggatccggtcagttatatgacggttccaaagaactgggtgatggattaaagaaactggacgatggttccgatactctccagagcagtctggcagacggagccgaaactgtaaaagaaaataaagcagaagatgtgaactatgagatgattgcagctcctgtagatgacgatgaagcaaaaatgacagaagtaccaaacaatggccatgcgatggcaccgtacatgatgtccgtaggtctgtgggttggagcacttgctttctgtctgatgtatccgctgacaaaatacaacggaaaattaaaatccggattcgcatggtggggaagcaaggcttctgtattatatccactggcgcttctgcagggtgtactggtaatcttcctgcttcatgtatttgacggatttaccccggcccagatgggtaaggcagtggcatttgcctgcctgacttccgtggcatttacctcgatcatgtacttcttcaatatcagccttggtaaagtaggaagcttcctgatgctggtattcatggttatccagctggcaggttccgcaggaacctatccggtacagctttcaccggcattcgtatcgaagattcatgcatgggtaccgttcacctattccgtagatgccttccgaagcgtcatctgcgcaggagaaagcatccggacaccagttattgttatgtgtgtgatcacaatcttatttacgatcctgaccatcatcgaattccagttccgcgccagacggatcaaagcaggaaaaccgattttccatgatttcctggaagaaaaaggactggcataagagaatagttacataaggaacaataaaaaacagttgttaccgaaatctctatatgagattcgatagcaactgttttttgaactgtacactcgaatccgtatcctgcgtgaatgatacagttatttacgaaacgatgtactggtacatccagatagcaattaatcgtgtctctcatcttcattgtcatagcactcacaaaaccgcgctgcgaatgccggtggctcgtctttgacgtacaggtgggaaatatctccgaaagaattcatacggaaatatgcgatccccgggcggcgctcttcggtgacgagggttgtgacggagcttggagcggcgcaggtgccgtgccacaaaaccatcggggaaatgtgcagcaggtgacttaacaggacacattccagaccgaagtggcagaagaagacaatcgtatcgttgtttgcgtgctctgcgcggtaggtaagaccgtcacggacatacccgtgactggcgagcagggcatcgaagttggtggttacccagtcatattcttctttgacatgtccttccatcatcacaggaactttccaccattcatccggcaggtaaaagcgaggttccgcggtccagtcctgtggcagccagtcccaggagatcatttccttttccgggacgtccgggcggtggatccgtgcatcaaattcgcgaagccaaggttcttcggtggcagtgcggttcattttcttcaaggtcagagaggcagtgtctctggctcttccgagaggagagacataaaaggctttcacatcgagttttgctagtttttcggaaaggtagtctacttctttccatccttttggcgtcagggagtcgatggtataatccggatccccgtgacggacgatcagtaatttcatataatagcctcctgtgtgtaaaataatcaatgttttctggtaatatagcagatattggaaaacagcggacagctttttatccatgcaaagttccggtattctctccagttgatataccactcctgtccccagctgctgatccgcagccatccgtgttcgatgccggtaacagtgacatagtgtgcacgagtggaagaagattttatgtaaactccatcgccggtctttttgtacaggggaagccggtctttcttccagatcaggggaaaattaccgccgatggatagaatgaccgggatatcctgactaagcagccggttgatctcctttccggtattccgatacccgatatgccagcaggcacggtaaggaagacggcggagtaagaaggccagattcagtcctgcggagagcatcagtccgttgattccgagacggggaagaatcggaaagagtcgatgcagtctttttacagatcgctcatagtcctcccaggagcgggaatcactgacgggctgttctccggaacgatggcggtccgtctgtgctgtcagagattctttccgttccagataccacagcagatcgtgcgccgcgatcagaccgcagccgtatccgcggatggaaggagaagaaaaccaggtctgactgccaccgtaggaagcaccttccggtcgttgcacggaaagttccgaggtgagacttcgtgagccggtttcggataaagaagttttgcgtggagtataaattatgttgtgtgtcataaaaaacctccgtatagaataaaaaagtatgctagagcgtgtctgaaaaatcatttccgcaatctgcaagccccactttgcggtatattttaccctcattcggttgccgtagcccgctacgccgctctcattcggataaaatctcccacaaactgggactcgcagctcacgaaaagcctttttcaaacacgttctaggattttgtgactgttcagtgaatagttacaaaagattacagaaaagccatgtcccggcacactttaccggaacatgactcttttcaattacattacatagcaatcaaggattcgatagatccattttcatgatgcgaataaacgacagtttataaagtttccgcgattcttcttgccacatacacgccgctggcagatgcatgggacagggagtgggtaacgccgcttccgtcgccgatgatataaagacctttgtaggggctttccagatgctcatcgatatccacttccatattatagaatttcacttcgacaccgtacagcagagtatcgtcatttgccgtgcccggtgcgatcttatccagggcatagatcatctcgatgataccatccaggatacgttttggcagaaccagactcaggtctccgggagtggcggacagagtcgggcgaaccagaccttcttcgatacggctgaccgtactgcgtcgaccgcgaaccagatcaccgaaacgctgtacgatcacaccgccgccaagcatgttggatagacgggcgatactctcgccgtatccgttactgtccttgaatggctcggagaagtgtttggataccagcagggcaaagttggtattttccgtgtattttgccggatcttcgtagctgtggccgtttgcggttatgataccgtttgtattttcatttaccacgatgccgttcgggttcatacagaaggtacggacattatcctcgaacttctcggtacggtatacgatcttgctctcatacagctcatcggtcagatgggagaagacaacagccggaagttccacacggacgcccaggtcgacacggttggacttcgtaggaatctgcagatctttacagacagtttccatccatttgctgccgcttcgtccgacggagatgatacactgtttgcaggtggcagtctcattcttgccgtagtgcagggtgtacatggaatcgttatattcgacagaagttacaggagtcaggaagaagaaatccacctgctctttcagttcgttgtacagattttccagaacgatatagttgatatccgttcccagatgacggacggaagcatccagcagcttcagcttgttttggatgcacagctttttgaatttggttccggctgtggagaacatacgggtattctcgccaccgtgggagacattgatctcatccacgtatttcatcagatctagggcagtcttttttccgatatgctcgtaaagagttccgccgaagtcgttggtgatattgtattttccatcggaaaatgcaccggcaccgccgaaaccgctcatgatcgcgcaggttttgcagccgatacaggtttttactttttcgccgtcgatggggcagtggcgtttgcttaacggattacccgcctcaaatacagcaattttcaaccccggttttttctgaaccagttcataggcagaaaagattcctccaggaccggctccgacaataattacatcatacatcataattgtcacctctgttttcgtaagactgaacgcataaaaaaagcccgtatccatggaaagaatacgagtctgtactcacgcaggggtatcccgcggggcgttttcatgcgaaagccatgtgttcgtttgagttctctatttcattatatcgaaaggacgaagtacttgtcaaggaatagggagaaaaagaaaatgaggaaaaaaatgtaaaaacctattgacgtggtggggatatggtggtaatatatgctcataaacatactagagaggtagggaatagggaaatgaaagagagattacccttattagtccgccacaattacagatttggacgaatgtgaagcacaaaagtgtggccgtcagagattccgcagcggatccggcgaacagcagtccgaagagcggaagaaaaagtaaaaagtgaaactaatgacccaagagggattcgatattacagaaagaataagaggagaaaagactatgagcaagaattataaatttgaaactttacaggtacatgcaggacaggaacatccggacccggctaccgatgcgagagcagtgccgatctatgcaacaacatcttatgtattcaaagattccgcgcaggcagcaggacgtttcggactgacagaaggcggtaacatctattcccgtctgatgaacccgacaagctctgttttcgaagagagagtagcagcactggaaggcggcgcagcagctctggctacagcaaccggttccgcagctatcacatatgcagtacaaaacattgcgacagcaggtgatcatatcgtatcttctgcacacgtttatggtggaacatacaacctgtttgcaaatactttaaaagagcagggaatctccgtaacatttgtagatccttctgatccggagaacttccgtaaagccattcagccaaacaccaaacttctgtatggtgagacactgggtaatccaaactccgatgtactggatctggaagcggtatctgcagtagctcatgaaaacggtattccgctgatcgtagatagcacatttgctacaccgttcctgcttcgtccactggagcatggcgcagatatcgtcgtacattccgcaaccaagtttatgggtggacacggaagcgtaatgggtggtgtgatcgttgatggcggcaaattcgactggactcagaacgacaagttcccgggaatcacaaaaccaaacccatcttaccatggtgttgtattcagcgaagcatgcggaaacatcgcttatgtaatgaagatccgtactactctgatgagagatcagggagctaccatttctccatttaactctttcctgcttctgcagggactggagacactgtctcttcgtgtagaacgtcatgtggaaaatgctctgaaggttgtagaattcctgaagaaccatccacaggtagaaaaagtaaaccatccatctctggcagaaggccatcagctggatctgtataacaaatatttcccgaacggtgcagcttccatttttactttcgaagtaaagggcggacaggagaaagcacagaaattcacagaatctctggaactgttctcactgctggctaacgtagcagacgtaaaatctctggttatccatccggcatctaccactcattctcagatgaatgaagaggaactgcgagaaggcggtatcacaccaagcactgtacgtctgtccatcggtacagaaaacatcgacgatatcatcgctgatctggagcatggtttcgaagcaatcaaataatataaaatattgaaattttctgattgacatgtgaagctgtcctttgatattctaatagaagataacagggagtagttcacaccagtcaggtgttggatgcctcgtcatcacgtcgaaagaccggggaatccactgaaagaagaacgagacttttatcgcattatttgtgtgcggtggaagtctcgttctttttctatataaaagaagcgccgacaaagaaccggacatttccagggcacacggaaagcaggaggaaaagagaatggaaatgattttacaggtgttgttactggtgttgggctttttgatgctggtaaaaggtgctgactggtttgtggatggagcgtcgggaattgcagagcgattcggaattccccagctggtagtcggactgaccattgtggccatgggaacaagtatgccggaggcggcagtgagtatcaactcggcgttaaaagggaacgcgggaattacgatcggaaacattgtggggagcaatattttgaatattctgatcattcttggtattactgcggtgatcacaacggtggcggtacagaaatctacgatatggatcgagattccctatatgatgataattacagttctgttactggtactgggaaaaagcggaaatcagattacactcagcgaaggtgttatcctctgggtggcattcttactttatctgggatatctgttttattgtgcaaaaaagaacaaagaagaagtggtcgaggaggaagcaaaaccgatgtggaaattgctccttgcaacggtactgggactactgctggtggtctggggaagtgatgttaccgtggatgcggcaaaggcaattgcaagggtgctgggaatcagtgagcgtgtgatcggtcttacggtggtggcacttggaacatcccttccggagctgttcacctcggtgtctgcagcacggaagggaaaagcagatattgcgatcggaaatatcgtgggaagcaatattttcaatattttgttcgtggtaggtacggcagcactgattgttccggtggagtttctcccgggatttggcattgatacggtgatagcgctgggagccggacttctgttatgggtctgtatctggagaaaacgggcactgaccaggccggcgggtattgtgatgttgatagcttatctggcttattttatgtatctaatgtagctttttgaaaatttcggaataaaagaaaaagtgtacaagattctacattgcactttccgaaaggtactactatactagagcgtgtctgaaaaatcatttccgcaatctgcaagccccactttgcggtatattttaccctcattcggttgccgtagcccgctacgccgccctcattcggataaaatcttccacaaactgggactcgcagctcacgaaaagcctttttcaggcacgctctaaatgtcatggaatgaaaaagtatggcagaaactttgggaggaaaatatggagaacaaaaagaaaaaattgtcggcgtattacaaaccgtataaggggctgttcctggcggatatggtgtttgcaatgatcggagcagccattacccttgtgattccgttgatggtgcggtatattacgggaactgttgtgctgcttcctattgaggaagcatcctcgaccatcatccggctggggatttttatggtgctgctggtgatcgtagaaggatactgtaactattttatcgggtattatggtcatgtgatgggggcgaagatcgaacacgatatgcgaaatgagatcttcggacattaccagaagctgtcctttgcatttttcgataatcagaaagtgggacatctgctctcaagaatcaccagtgacctgtttgatatcacagaactgttacatcatggaccggaagatgtggtcatctccacgatcaagctggtgggagcatttattatcctgttgatgatcaatgcaaaactggcgttagttgcaatcggttttgtagtgatcatgctgctgtatgcggtaggaatgaataaccggatgcgtggggcattccgggaaaaccgtgccagaatcgcagatattaacagtcagattgaggacagtctttccggtatccgtgtagttaaatctttcagcaatgaagagaccgagatggataagttcgaggaaggcaacagccggtttgtggcatcgaagaaaaggacataccggtttatggggtcttacaattccgggatgggagtattttccacactgatcacggttggatccctgctgatgggtgcatggctgatgatgaaaggggaactttccgcagcggatctggtgacctttcttctatatattaataacttcaccgaaccggtgaaaaagctggtaaacttcacggaacagttccagaacggttacagcggttacgaacgttttctggagattatgagtatcgcaccggatatcaaagacaaagaggatgcacagtctctggatcgggtgaagggagagattcagtttgaggatgtatcgttccattacagtgaaaataaagaaaatgtactgtctcatgtgaatctggatgtgaagccgggagaatatgtagcgttagtcggaagcagcggtgcaggaaaaacaactctgtgttccctgattccccgattctatgatgtaaccggaggagctgttttgctggatggcatcgatattagagatgtgaaactaaaagatctgcggagacagatcggtatcgtgcagcaggatgtctatctgtttgcaggaacgatcctggaaaatatccgttacggaaaaccggaagctaccgatgaagaagtggtgaatgcagccatggcggcaaatgcccatgaattcatcatgagcctgccggaggggtatcatacggatatcggacagagaggtgtaaagctttccggcggtcagaagcaacgactttccatcgcccgggtattcttaaagaatccaccggttctgatttttgacgaagcgacttcagcactggataacgagagtgaaaagatcgtgcagcattctctggaaatgcttgccaaagacagaaccacgtttgtgatcgcccatcggttatcgacgattcgaaacgcacagagaatcctggtattgacagaagacggtattgcagaagagggaacccataagagtctgctggctcagggtggtatctatgctggattgtacaatatgcaattttgatgtattatgatgtttttgtcagatttctgagtctgggactctggtatcatataatgaccggtatgcgaggagctgccggtcattttctgttgccaagcatacgacaaaaagatccggtggaccttttttagtgtatatcttccgttgacttaagtgtcgaatatatttataatacacagtagtgcgtaaaaatgtgcagaagacgcgaagcaggcagtccgacacagatgcaggaaagaatgaggagataccgatgaaaacatgggaagagaatgtccggaaagtagttccctacgtaccgggcgaacagccaaaagtacaaaatttgatcaaactgaacaccaatgagaacccatatccgccgtcaccgaaagtggcagaggcactgaaagcgatcgatgtggactgtatgcgtctgtatccggatccggcagcttccgtactggtgaaaggtatcgctgacttttatcagttgcaggaagaccaggtgtttgtgggcgtaggttctgacgatgttctggcgatgatttttatgacattttttaattccaaaaagccgattttgttcccggatatcacctattctttttacgatgtgtgggcagatatgctgcggatcccgtatgagacggttccgctgaccgatgattttacgatacggaaagaagactatttccgggaaaacggaggaattattttccctaatccaaacgcaccgaccggtgtggagcttggcatgcaggatgtggaagcaatcatcaaagccaatccggatgtgatcgtagttgtggatgaagcttatgtggactttggtgcggcatctgcgctgccattgatcgaaaagtacgataaccttctggtggttcagaccttttccaaatccagaggaatggcaggtatgcgtatcggctatgccatgggtaatccggtactgatcaaatatctgaacgatgtgaaatattctttcaattcctataccatggatcagaccactctggcgctcggggcagctgcgatcgctgacagggcatattttgaggaaacggtgcataaagtggtggagaccagagagtggaccaagaaggaactgacaaaactcgggtttgtcttcggagattccaaagcgaactttatctttgcctctcacccggagattcctgcagcggatctgtttgcagcgcttcgggaagccaatatcatcgttcgttattttaacaaaccgagaattgccaattatctgcgtattaccattggaacacaggaagatatggaaaaattgattgaattcttaaaaaaatatgtaactgttcagagccaagcaaaatttcaaaaaacagatgtaaaatgcttgcatttttaaaactgtttttgaaattttatttggcggatacgccacaccgacgaaatgcgtagcattttggaggttggctctgaacagttacaaaaatataaaaaataggagaaatatatggaatcacttgttacatggtttgccacaactttaggaccttatatatcggagaaagcagtcgtttttctgatttcgatgatgcctcttctggaacttcgaggagggctgcttgccagttcgcttctgaaagtatccgctgttcaggcaatcccgatctgtatcatcggaaatattttacccattccgtttatcctgctgtttatcaagaagatcttccagtggatgaaaaaaataaaatgcttccggggactgattgaaaaactggaaaaccgggcgatgggaagaagtgaaaagatccagcaatatgaattctgggggctggtgttatttgtgggaatccctcttccgggaaccggcgcatggacgggtgctctgattgcgtccctgcttggcatcgatattaaaaaatcctcactggctattctttgcggaattgccatggcaacggtgatcatgtacgttgtatcctatgtactggtgggaaatatcgtgagttagtaactattcagtagccactgtaccgcgaggcgttttggcatgaatatgccaaaatcccgagacatacaagccaaaatgccatcatcgaaggtgatttacgcgagcaacgagtcaaagtccgtgcttgcacggaaccttgaggagtgccgcgataacgataaaaactcgcaaagcgtgtttttatcgtttaaatgcattttggctcgtaactgtgaaggtactgaacagttacgtgagttaaataaaaaaatggataacaggctgtcacggatgaatgtccggagacagctttttcaatttctgtggacaacgaatgatatgctgtgcttatatgaactcctgatgactgctggaatcatcaagataacttcaccggatcaatgaatggtttacgagaataacagagtcatacaacgcctcctgtgtccatatagtaaagagagaatgccgggaaatgggtgaaaaacatgaaaaagggaatgtggggtgttggggttcttgcacttgtgctgatcaccgggctgtctgttttttaccgggcacaagtggggaaaaaggttgtcacggcaagtaccagtgtgaacgggcaggagctgccgatctgttctgtgcaaaccgggaaaaagcagatagcttatacctttgaactgagtggaacgcaaatcgggaaggggcaggtagaacagatgttacagattctgcagcagcaggaaattccagccacattttttgccactccgtcctggatcgagaaccacaggagtctggcaatacagatctgtcagcaaggacatgagatacagggattgggggaacaggcggtatgcgtggaacagatgacggcgaaagcgtgcaggaaggaacttcagaagatcagggagacgattggaacagttacagaggagccaggtgtatttttccgtattcccggcggggaatataataatgaagtactccggacgatatatgcctgcggaagctatccggtggcatggagtgtcgacagtatggactggaaagagtatgaagccagtgaacttgtcaggcagctgctgcagtcctgtacgatccgggatggtgagattctccgcttccatggggaaggagaaaataccggagaaatggtgaaattgctgcatccccgtctgaaagaggagggatatgaggcggtaacggtgtcacagatggtttacaaagatcgctatcggatgacaacggatggcagacagattccggaaaagtcaaaataaagtaactttcagttaaaataaggcaatttttttcatggagtatcctgtatactaaagaaaaagagaggtaacgaaacagcagcaaagatgcgggaacgttatcggggtagcactagagcgtgtctgaaaaatcatttccgcaatctgcaagccccactttgcggtatattttaccctcattcggttgccttagcccgctacgccgcccttattcggataaaatctcccacaaacttggactcgcagctcacgaaaagcctttttcagacacgctctaaagatttatggaggtaagaaaactatgattcgcagatacgtgtatggaaacgtgattgaaacagaagccgtgttaaacaaaccggaacaggaaaacggtgcactgccttattttactgtggatgagtaggcgatgactctgtcttataccgtggacgaagtagactttgatcatccggagtgcatcggttttgtagaaaatgttgctgagtacgagtactacaacgataacggatatgagaaagattacgagaatccggcgcacatcaccgttcttcgtatggaagcagagaaataaaacagacattactgtgaaagaaaaatatgccccggaggattctgatatgatcctccggggcacattttttatgttgtttataacatttccgaattaaataataattgtaattacacggataataaacagtgcacatacgatatacataaccggatgaatctttttcagctgaccggtgcatactttaatgatgaaccatgccagaacaccgaacatgataccatttgcgatagaatacgtaagaggcatcatcaggaatgccagatatccgccgacagcatctgccagatcaccgtcgaattccattttcttgatggaagaagccataaagaaaccaacgattaccagagccggagctgtggcaaagcttggaatagccaggaagatcggtgacaggaacagtgcaaccaaaaacaggataccggttgtcatagcagtcagaccggtttttccgccttccgcaacaccggaactggactctacgaaactggtaacggtggaagtaccaagcatagaacctgctaccgtaccgatagcatccgccatcaggacacggcctacacgaggaagattaccgtcctcatccagcagatctgctttttcggcaacaccgataacagtaccgatggtatcgaacatatctacaaacaggaatgagaatacgataacaacgaactcagatacatgagaaccgatccatgcgaaatcaaatttgcagaaagttgatgagatggacggcgggatgaaggaagaagcactcagagacggaatcagagaggctgccccagcatccggatctactacataccagcctgtcagctgagcaatgattcccagaacccaggtgatcaggataccccagagaatagatccttttacattatagtgattcatcacagcaatcaccaggataccgatcaggcacagagcaacttccggtcttccgaagttaccgagtgcaaccagtgtggagtcatcagatacgacaacaccggcacccttaagaccaacaaatgcgataaacagaccgataccggatgtaataccgtatttcaggttctcagggattgcgttgacgatcgtttcacgcaatttgaaaaatgaaagaataatgaaaatgataccctctaccagtacagcagccagtgcgatcttccagggatcatcgattccctgcagctgtccaagacatactgtataagcaaagtaagcattcagccccatacctgcagacagtgcgatcggatagtttgcccagaacgccataataaaggtcgccagtgcagaggccagtgcggtagctgtgaagacggctccgctgtccattcctgaagcacttaacatgttagggttaactgcgagtatatacgccatggtaagaaatgtggtaataccggccatcacttctgtttttaccgtggtgttatgctctttcagtttaaagagtttttccatggtttgtttccctcctatgattaaatggtaaaataataaaaactctattaagattgtaatggattgcttcccggtttgtcaacgcggacttcccaaaaaggtgggaatacgctataatgagcataattctaatatgaatgaggcaactgtaaataaaacagatataacggttcggtatcttcgcagttacgaaccaacagctacggaaccgttgcaaacagacaatctaagtggcagcagaaagtgaggaaattctatgaaatttacgaaaatgcagggtatcggaaatgattatgtatatgtaaactgttttaaagaaaaggttgaagatcccggggaagcagcgatcaaagtcagtgaccgtcatttcggaatcggttctgacggactgattctgataaaaccatccgaggtggcagatttccagatggatatgtacaacgcagacggttcccgtggagcgatgtgtggaaacggaattcgctgtgtggcgaaatacgtatacgattacggtctgacagacaaaacatctgtctctgtggagacggcaagcggcatcaagtatctggatctgaccgtggaaaacgggaaagtggtgctggtaaaagttaatatgggcgcaccgatcctcgaagccgcaaaaatcccggtagtttccgaaaaagagcaggtgatcaatgaaccccttctggtagacggaaaagaatatcgcatcaccggcgtatcaatgggtaacccacatgcgatcacatacattgacgatgtaaaaggattagacatcgaaaagatcggtccgaagtttgagttccatccggcttttcctgacagggtaaatacagaatttgcgaaggtgctggatgatcataccgtagaaatgcgggtgtgggaacgtggttccggagagacactggcatgtggaacaggtgcctgtgcggtagctgtggcttcgattctgaacggatatgtgaaagaagaggaagtgacagtgaaactgctcggcggggatctgaagatttactgggatcgggaagaaaacctggtatacatgactggaccggcagcggttgtgtttgacggggagatcgaactgtaaaaagagaataaaggttgctaaagcggacgggagcggctggagtttcttgtccgggcaacgtgggcaggggaactttgaactaatccctaactgcgactaagactctcgcgagagcgctcgagcctaagtctccgtaagggctggatttcaaagcttcccctaaccgcccacaaagtgttgccctgacaagaaactccagccgctccctgagcgttagcaaagggggaagtgaggatgtgtggggaagggtgttggaagaaaataaatagagcataggtttgaacgtagtacaagaaaagtacatatctctgttttgaagtgtaaagatagtaagatacattaagaattaaatcatgcagaataagataaataagaacaggcagatgagtaaggcaagaaaatgtaaaaacaatagccagaaaatacagagggctaaaagattaaactgaaagcggaggaataatagttgatttttaaagaatatttagataaagagattcagtcccagccaacacacagcgagagggatcgggggtcccgggggcaacaacactttttgggcggttagggcaagctttgaaatccgacacttacggagactttcgcttgggtcagctgacccaagcgaatatagtcgcagttagtggctagttcaaagttgccctgcccaagttgttgcccccggaacccccgatccctctcgcgtccccttgagaaaactatctacaaatcttacattacaacagcggaatattatgctcctccgccagtttcaccgtctcctccggccataacgaacagtgaacctctccgatatgagccttccgcagataaaacatacagatacgggactgtccgataccgccaccgatcgtaaatggcagttcatcattcaaaatagccctctggaaatccatttccgcacgttcctcacagccacaaacctccagctgatgcttcagagcagctgcatccacacggatacccatggaagaaagctccagagcgatatccagaaccggataataaacgatgatatcaccgttcagctcccagtcatcatagtccggtgcacgaccgtcgtgtggttcgccggatgccagcatcttaccgatctgcatgatgaacacggcacccttctccttcacaatcttatattcacgatccttgggagaaagaccaggatacatatcttcaagttcctgggaagtgataaagaaaatatccttcggaagaatctcttcgatataatcatactgaattgccatgtatttttcagtcttcttcagtgcagaataaacggtgcggacaacatcttttaaggtgtccacattacgctcttcccgtgtaatgatcttttcccagtcccactgatccacatagatagaatggatattgtcggtatcttcatcacgacggatggcaaccatatcggtatacagtccttctccatgtgcaaaaccatactttttcagtgcataacgtttccattttgcaagagaatgtacgatctcagctttctgatccggcgattccttgatatcgaaggtaaccgggcgttctacgccgttcagattatcgttcagaccggatgaaggatctacaaaaagcggtgcggacacacgcagcagattcaggcggtcagaaagggttttctgaaaaaagtcttttacggtcttaataccaacctgtgtatcgtgaagcgacaatgcaggctgataattttccggaataataaaatgttccataacaatcctcctcaaatttgaaaggcatccagctaagaatcacggcagacaccaacaactctttacctgtctaccccggtattatggtaatattatagcagaaaaccccccgaatacaacaattgattttgctatatccatgccaaaacattccgcgggatattaccagtgaacagtaaccggaatatcgcatatgcacagtaaggatcaattctgccttgtaacttaacatcaattgtgctactgtagtaagcagagtacgtttgggaaggtcgggaaacgggatggaacaggaaaaaatacttgtggttcttcctgtaaaagaagaacataaagaacgaatcagaaatgcagcaccggacgcaaagacaacttactgcctggaagcagaggtgacaaaagaacaggtgcaggatgcaaatattattatcggaaatgtgaaaccggaattcttaaaagattctcggaatctgcgctggatacagttaaataacgccggaacagaaggattttgtgtaccggggatcctgccaaaacaggcacagctgaccaatgcaaccggagcgtatggaatggcgatctccgagcatctgatcgcgatgctgtttgcgcttcagaaacgcctggacatttaccagaaccagcaaaaagaccaccactgggagaaacagacccatatgatggttacagagggaagccatgtcctggtgatcggtcttggagatatcggaacgacatttgcaagaaaaatgaaagcactgggcgcgcatgtgacaggtatcagaaagagccggaaaccgaagcctgaatatgtggatgcacaatacacgatggaagcactgccggaacttctgccacaggcagatattgtggcactgagccttccgggatacagtgacaccaaaggagtcatcggtgagaaagaattacacttgatgaaagagaatactattctgttaaatgtaggccgcggaaccgcgattgacagtctggctcttgcgaaagccctgcaagagggagcgatttatggggcaggtcttgatgtcacagatccggaaccactgccggaagatcatccgctgtgggatgcgccgcattgtatcattacgccacatgtgtccggcggatatgcactgccggagacactggaaaagattctggaactttccatcgaaaatctggaacgttatgagaaaggagaaaccctccacaatatcatcgacttttctaccggatatgtgaaaagataaaaaaaggcattggaaaagttgcataaaaaataaaataaaaaaagagaagaattttcagggttcttctctttccttttgtagttaaccgtgttatactgttgtatacaatatgttgattaaaataaaagaaaaatactatatatagtagtgaggagcgggaacaatggtatatattatcaagaaagacggcaccaaagaagagtttgatgccagtaagatcaagcgtgcggtcaataagtcagccggccgtgtaatgtatcggtttaccgatgatgagattaattttatctgcaaatatgcaactgaccgggcggaagcgatgtcaaaagagcgaaaaggcggaatcctgatccaggatatgcacaacattgtggaaggcgccctggaacaggtgaatcctgcagtagcaaaaagttaccgcgattaccggaattataaagtggactttatccacatgatggatgaggtatatacaaagagccagtccatccgttacatcggtgacaaaagcaacgcgaacactgacagcgcgctggtggcaaccaagcgaagcctgatctttaatgaactgaacaaagaattatacagaaaattctttatgaaccggaacgaactgcaggcatgcaaagatggctatatctatattcatgatcagtctgcccgtctggacacgatgaactgctgtctgttcgatgtgggatccgttctgcgtggcggatttgagatgggaaatgtctggtacaatgagccgaagacactggataccgcatttgacgttatgggggatattatcctcagcaccgcagctcagcagtacggcggatttactgtgccggaagtagataagatcctgtccccgtatgcacagaaaagctataacaaatattatgaagaattcttgaaatattccgatccgtcctgggaaggaagagaagaaaagggtcgtgtatatgcctgggaaaaagtctgccgtgactgtgatcagggatggcagggaattgaatataaattaaataccgttggttcctcccgtggcgactatccgtttgttacagtgacactgggactgggaacgggaagatttgaaaaaatgatctcaaaatctctgctgaaagtccatatgggcggacagggaaaagccggacataaaaaaccggtactgttcccgaagattgtgttcctgtatgatgaagagatccatggagatggaaaagaatgtgaagatgtctttgagacaggtgttgcctgctctgcaaaaaccatgtatccggactggctgtccatgagtggccagggatatatttccagcatgtacaaaaaatacaaaaaagtaatcagcccgatggggtgccgtgccttcttaagtccgtggtatgagcgtggcggtatggaaccggcagatgaaaacgatgtgcctgtttttgtcggtcgtttcaacatcggtgcggtcagcctgcatcttccgatgatcctggcaaaagcccgtgcagagaacacagatttttatgaagttctggatttctatctggagatgatccgcggactgcataagagaacatacgattaccttggtgagatgcgtgcttccacgaatccgctggcatactgtgagggcggtttctacggaggccatctgaaaccatccgataagatccgtccgttactccgtccgatgacagcttccttcggtatcacagcactgaacgaactgcaggaactttacaatggtaaatccattgccgaagacggagaatttgcactggaagtgcttcgttatatcaatgataagattaatgtctacaaaaaagaggatcagatcctgtatgcaatttacggaacaccggctgagagcctttgcggtctgcaggtagagcagttccgcaagatgtacggtatcgtgcgcggggtatccgaccgtccgtatgtgagcaacagtttccactgccacgtaactgaggatattactcctatccaaaaacaggatctggaaggaagattctgggaactgtgcaacggtggtaagatccaatatgtcagatatccgatttcctacaatgtacatgctataaaagcactgatccgtcgggcgatgaatctgggttattatgagggtgtgaatctgtcgctggcctactgcgacgattgcggacatcaggagctcgagatggatgtctgcccggtctgcggttccagaaacctgaccaagatcgaccgtatgaacggatacctgtcctacagccgtgttcacggagatacccgtctgaacgatgccaagatggcggagatcgcggacagaaagtcaatgtaaaaacatcagaaataataatatagaaataatatgataagaagaaatccgtaaaattctgatcagaaatcagttgttttacggattttttctttgtatttgcaacctggtgcctgacagtatccaaaggagggcagggaggaataaattctgcgtatcacgaagcgtgttacaggaaacggagtgaacaatcataaatatacagaaaataaaaggcgtatctgtgaattatatagacaaaatccaccggattatttatacttgatatagatgtgcaaacaggagggtaccagtatgggggaaaagacagttgatatgacgaaagggagcatcttgccgaagatgattcggtttgcactgccggtgcttcttgggatgctgtttcagagaatctataattttgtagatgtttatatagtaggaagatatctcggagatgaggcacttgctgcggtcagtatcgcaggtggagccatgtatctgctgttttcgattatgatgggcctgacgacaggagtaagcgtggtggtttcgcagtattatggtggcggggatgagaaaaaagtgacagaaacctttgtttcttctatctatgtggcggttgtatctacgctgatcattacaattgcgggactgatcggggcacgaccgcttctgagggtcttgcagacctcgaatgatctgcttgaccaggcaacggtatatctgatggttgtatttgccggagcagtgggaacgatgctgtataactggatctcggcggtgctgcgttctttggggaattcggtggtgccgctggtattcctgattatttcgagtgtgctgaatgtgattctggatatcgcctttgtggtctggattccgatgggagtagcaggggcggcatttgcaacggttctggcacagttgttgtccgggatcggatgtctggtttatgcatggaagatccttccgattcttcggtttacgaaagaggaactgcgctgcgacagggagctggtaaaacagatgttgatttacggtgtaccgaccggtctgcaaatgagtattatctcagtgtccgatatgactttacaggcaatggtcaatacctacggaactgctctgatcgtggcctatggtgtctgcatcaaagtggaaggtgtgggatggcagatggcggaagccatcggaacttcactgggaacctttaccggacaaaatgtaggagcaaaccacctggatcgtgtaaaacagggagtcagatgtgcctatctgatgaatgcagtctgttatggaatattctgtccggtaatctggttctttgcccgtccgatcatggaagcatttaccggcaatccggaatcgatccgttacggtgtggaatatatgaagatcttcagctgcttcttttttgtgggcggtatcctggtggtttatcataatatcctgcggtcggcaggagatgtaaccatcaccgtactgatgggagtcagtgaaatcatcacccgaatcggctgcaccttcctttttactgctgtttttggatactatgggctgtggtgggtatctccgctgacctggtgttgcgcgatgctggttggttgtgtccggtattattcaggaaaatggaaaaagaaggtacagcttcagagaggagacagtatacatgggtagaaaaagaaaaccaaagatggaataccgttattatgaaattccgacaggaagtccggtgcttgctttactgggggataaatgggtgcagaattacggaagggagattgattatctgcattttcataatcatctggaagttgggttttgctattatggggaaggcacagttacttttaaagaagaagacctaccctttgacggaaatatgtttacggtggtaccgaagaactttccgcatactacaacctctacgggagacagtatcagttactgggagtggctgtttattgatgctgacaaattcctgagggaagtttataaagataaccccaggatggcacagaaagtgatcgatcgcgtgaataagagagcccattttgtgagggttcaggataaaccgcagatcggggcactggtgcagcagattattgaatgtatgcgggaaagaaaggaattctatctggaagaagtgaaaggactgaccctggcttttcttttacaggtggcaaggtggaatcgggaagaagtggaaaaggcagaattcgaggcgggaaataccagtctgatcacaccggcgattgactatatcagcgaatgctgtgaccgtccgatcaaggtggaggaactggctgcgatgtgccatatcagtgaaacgcatctgagaagggtatttcgtgactgtatgcagatgtcgcctgttgaatatatcaattgggttcgaattcgcacagcatgtggggaactgaagcgtacaaacgatacggtgggagatattgccgtacgatgtggcttctccacattatccacgttcaacaggaattttcacaggattatgggcatttcgccacaacagtggagaaaggatccggaacattttgaacggaaattgttgaattatgatataaaagccgaaaaaggatggtaaaaaccgtcaaaacatcttaaatggatgaaaatgcacagaattctgttaaatatgagtacacatgcaggaaaagtatggtataatgtgtacataatgattcacagaaagttcaaaaactgtacacattcactaatgggaaaagcgagtgagagatgccggtttttggcagagtgaacaaatacatatcaggaggatatacatttatgaaaagaaaaattgtagcagttgtattagcttccacaatggtattcggaatgacagcttgtggctcttcaggagcaagcgattcctcaagcacaggaagcgacgcagcaacagacgacacagcaacagatgacggttcagaagaggcaaacgttacagaaggaagttctgacgatgaaaacacactgactgtttggacatgggatccgaacttcaacatctatgcaattgaaaaagcagcagagatctatgcaaaagatcatcctggattcaaagtagatgtaagcgagatcaaatccgacgatatcgaaacaagactgacaacagctgtttctgcaggagatttgagcacactgcctgacattttcctgatgcaggataactccttccagaaatatgctaccaactatccggacgtcttcacagacctgacagattccggtatcgacttcagccagttctcatccgcaaaagttgcttactccacactggatggtaagaactatggtatcccgtttgataacggtgctgttatcgaatgcctgcgtaccgatatgctggaagaagctggatacacagtagatgacttcacagacattacatggtctgatttcatggaaaaagcaaaagttgttaaagaaaaaaccggtcagccaatcctgacatctcaggctggttcacctgacctggtaatggaaatgctgcagtcctgtggagagtctctgttcaacgaagacggatctgttaacatcaaagacaacaaagctctgaaaccaatcctggagatctatcagcagatggttgcagacggaacattagtagaagttactgactgggatcagtacatcgcatctatcaacaacggcacaacagctggtgttatcaacggatgctggatcatggcttctatcgtagctaacgatgatcagtctggaaaatgggcgatcacaaatatgccgaaactggatggcgttgacggagctactaactactccaataacggtggttcttcatgggcaatcagctctaactgccagaaacaggatcttgcaattgactttatgaaatccacatttgccggaagtacagatctgtacgatgacatcatctccaaaggagctctggcaacatgggcaccagctggcgatacagatgcatatgctcagcctgtagaattcttcagcaatgaagcagtttatgctaagatcgtagattttgctacaaagactccttccaatatcactggtgcattctactatgatgctcgtgatgctgtaggtgttgcactgtccaatatcatccagagtggtgcagatctggacgatgaaatcgcaaccgcacaggatactgtagaatttaatatgggtggctgattcagctgaacagttaaaaaccaagaagtgaaaaataaataagaagagggtctgcttcgaaaaaagcggagcagaccctctttttctaagaaatctccaaaagaaaggaaggatggatttcatgagcaatcagaagaaaaaaggattgacactggcaaagaaacacaacctgaccggttgggcgttcttacttcctgcaaccctgttgattggctggatgagtttttatccgatgattcgggcgttcatcctgtcattacagacgggcatgggtgtaaacctgagctttaatggctttgcaaactatgcacgtattttaaaagacccaacgtttaaacagacattatttaacacattcttctacctgatcgttcaggtgccgattatgctggtgctggcgctgatgtttgcatctatgctgaacaacaaggatctgaggtttaagggcctgttccgtacatgtattttcttaccatgtgcgacatctctggtttcttacgctatgatcttccgttctctgtttgcaaatgatggtttcattaacatggttctgcgtagtttgggtatgtcaccgatcatgtggtttggtaatgcatggacagcccgtgccgttatcatcatcgcgctggtatggagatggacaggctacaacatggtattctatctgtccggtctgcagaatattgaatattctgtatacgaagcggcaaagatcgatggggcaagcccgatgcagtcattcttcaagattactgtaccacttctgaaaccgaccatcctgctgacagccattacatctacgaatggtaccctgcagctgtttgatgagtccctgaacctgacaaacggtggtcctggtaaatctactatgacaatgtctcattatatttacaacatctcctttaagcagagcccgaacttcggttatgctgcggcgatgtctatcctgatcctgattatggttgctattctggcaatacttcagatgaaagtaggtgacgagcgataatgggtaaaggtaaaaaattcttcatgtatcttatactgtcaatcgcgtcaattgtttctgtatttccactgtactatatgttctgtgcatctacaaacaagagcgttgacgttattgcaggtaaactgattccgggaacgtatctgattgaaaactacaaagcactgatcgcgaaccagaatttgggactggccctgtggaattccttccgaaatgcaacagtactgactgtcctgtgtctgctgatttgttccatcgccggttatggctttgagatctatcacgataaaggaaaagacgttgtatttaccatcctgctgactgctatgatgattccttttgcagccatcatgattccgatgttccgtatgttctctactttgaaaatggtaaataccatgacagcgttcatgcttccatccattgcaactccgtttatgatcatgatgttccgtcaggcatccagatccttccctcatgatatcattgaggcagcaagaatcgatggtctgagtgaagttggtatcttcttccgtatgttcattcctaccatgaaatccacatacgcggcagctatcatcatcacattcatgggtgcatggaataactatctgtggccaaaggtaattctgcagaataaagatgcgatcaccatgccgatgctggtttctaacctgttaagtggctacaccgtagattatggtatgctgatgttaggtgtatttatctgtacaatcccgacagcaattatcttctttgctttccagaagagctttacagaaggtatcacaggtgctgttaaataataaaaaagtagctgtgcatatgctgaatggttatgtataagtaaattaaggcggatatttatagtatatgaatatccgcctgttttttagcaaagattgaaaaataggaggaaaaacagaatgggtactttcaattacgatttggtaaaagatcctacgtattttaacgacaaccgtgtggctgctcattcagaccacaaatattacgcttctgtggacgcgatggaacaggatgtgaataacttccgtcacagcctgaatggactgtggaaattccattacgcaaaaaattacaactctacgatcccgggatttgagaaaacagaatattgttgcaaatcatgggatgatatccgtgtaccggctcatattcagatggagggatatgatgtaccgcagtatgcaaatgtacagtacccgtgggaaggaagagaagaagtagaactgggtcagatcccggagagattcaatccggttgcttcttatgtgaaatattttgaagttccggaagagatggaaggcaaaaaagtatttatctctttccagggtgcagaaagtggtatcgctgtatggctgaacggtaactttgtaggatacagtgaagatacctttacaccgtccgaattcgaactgactccttatctgaaagaaggagaaaacaaactggcagctcaggtcttcaaatggaccagcagcagctggtgtgaggatcaggacttcttccgtttctcgggtatctaccgtgatgtctatctgtatgcgatcccggaagtccatgtatccgatgtgaagatccagacacttctggacgataccttcaccaaagcggatctggtgatcgataccaaagcaacaaaagccggaaaagtaaaaattacattatccaaagacggagaagaactgcagagtgtagaagaaacactggcagaggagtctcagtatgtgatgaaagtggagaatcctgaactgtggtctgcagaatctcctgtattatatgatctgttactggaagtgatggatgagaacggacaggtgacagaagtgatccctcagagagtgggcttccgtcgttttgagatgaaagattctatcatgatgctgaatggtaagagaatcgtcttcaaaggtgttaaccgtcacgaattcagttctgtatctggccgtgtggtatccagagaagaactgatcaaagacctggtaaccatgaaacagaacaatatcaatgcgatccgtacctgtcattatccggatgcagtcggaatctatgaactgtgtgacgaatatggtatctacatgatcgcagaatgtaacatggagagccacggaagctgggacatcagcgcagaacagaccggtgacttcagcaaagtcgtaccatgtgaccgtccggaatggatggatatgatgcttgatcgtgttaactctatgtatcagagagataagaaccatcctgcgatcctgatctggtcctgtggtaatgaatcttttggcggaaaagtaatctacgagatgtcacagctgtaccgtaagatggatccgaaccgcctggtacattatgaaggtgtctgccacgacagaagatacaacgataccagtgatatggaaagccagatgtatccgtctgtagaagctatccaggaattcctggaaaaagacagaagcaaaccgtttatctgctgcgagtacactcatgcaatgggtaactcctgcggaggtatgcacaaatatacagatctgaccgataccgagccgtcctaccagggtggatttatctgggattatatcgatcagtccatctacaaaaaagaccgttacggaaaagaattccaggcatacggcggtgacttcaatgatcgtccatgcgactacaacttcagcggaaacggtatcgcatacggcggagaaagagacgcatctccgaagatgcaggatgtgaaattcaactaccagaacatctctgccaaagtggaaaaagaccaggtaaccatcgtcaacaagaacctgtttatcaacactgatacctttgactgcttcgtagtacttgcaaaagatggaaaagaagtaaaagaagttccgatggaaactcatgtagctcctttgagtgaagagaccgtaagtctgccgattccggtacagaatctgccgggtgaatatgcagttactgtatccttccggctgaaagaagataccgtatgggcaaaacgtggtcatgaagtggcattcggacagggtgtctacaaagtagaagcacctgcaaaagctgtaaaacctgcaagatttgaagtgatcagatccggtcatgactttggtgttcgcggtgaaaacttcgatgtgctcttctcttacctgaatggcggtcttgcttcttaccgttacggtggagtggagatgatccagatgatcccaagaccaaacttctggcgtgcaccggttgacaacgataacggaagcctgatgcagatgcgctgcggacagtggaaactggcatccatgtatctgtctcacaaatatccaaccggaggacattatccgggaatgcatatccctgagatcgaagtcctggatgacagtgcaaagattacatttacttatgcaatgccaacgactccggcaaccgagtgcaaactgagctatcaggtatatggagacggaagcatccgcaccacactgacttatgatccggtagagggtctgggcgatatgccggaattcggtgttatgttcaagttcgatgcagattatgacaatgtgacctggtacggcatgggaccggaagaaacttatgtggacagatgcgaaggcgcaaaactgggtatctacaggaacaaagtggaagataatatggcaaaatacatggttccgcaggaatgtggaaacaaggttggcgtacgttgggcatctgtaacagaccgtaagggcagaggaatgctgtttaccggtgatgctatggaattctccgcactgccatatacaccacacgagatggaaaatgcgatgcatccatttgaactgccacaggtacactacacggtagtacgtgtatccaaacagcagatgggtattgccggagacgacagctggggtgcaaaaccacttccggaatatctgatcaaaaccgatgaaaagatggaatttacattcacattcaagggaatctgatgaaaattgcaaattaaatgattaaatgaaaggaaaagcctttctccttgatgtgaaaggagaaaggctttttgttaagacaggagaagaacttatggcaagagaagtaaattttgggaaaatgctccatggtggagattacaatccggaacagtggcttcacagcccggagattctggaaaaagacatcgaatattttaaaaaagcgaaaatcaatgaagtatccctgggtatattttcctgggcagtactcgaaccggtagagggagagttccattttgaatggatggaaaagatcattgaccgtctgtatgaaaatggtatttctacaattcttgccaccccgaccggagcaagaccaagatggatggcacagaagtatccggaggtgcttcgtgtagacgccagtcgtcacagaaatctgtatggagaaagacataaccactgttatacatctccggtgtacagagaaaagacaagaattatgaatacaaaactggcggaaaaattcaaagaccatccgggtgtgatcgcctggcatatttccaatgaatatggaggagagtgtcattgtccgttgtgtcaggcagcctttaaaaactggctgaaagacaaatatcagacagcagataagatgaaccgggcatgggcaaccacattctggagtcaccgctataacgattttgatcaggtagacagtccttccccaagaggagacagctctcttcacggtctgaacctggactggaaacggtttgtgaccgatcagactgtagattttgtaaaatgggagatccaggctcttagggatgcaggatccgacaaaccaaccaccattaatatgatgtacgatttccagggattaaattatcacaaatttgctgatgtagtagattttgtatcctgggataattatccacagtggcacaagaaagaagaatacctgacagccatggataatggcatgcagcatgatatcatgcgaagtattcagaaaaaaccatttttactgatggagaactgtccgtcggcaaccaactggcagtccgtaagcaaattaaagaaaccgggaatgcttcatgcagcttccatgcaggctgttgcccacggatccgacagtattttgtatttccagcttcgacagagccagggttcctctgaaaagttccatggtgcagtgatcgatcattatggcaaggatgataccagagtatttaaggaggtaacggaagtaggagaaagtctggaaaaacttcaggaagttaccggagcgaagaacccggcacaggtggctgtggtatatgactgggagaaccgctgggccatggaagacgcccagggaccaagaaataaaggactgttctataaggaaactgtggaaaaatcctattacgcattccgcaaacagggactgaatgtggatatgatcgatatggagcaggatctggatggttataaagtagtagcagcacctatgctttatatgttcagggaaggatttgaagagaaggttcgtaaatacgtagaaaatggtggaacctttatcctgacttactggtccggtatcgtagacagtaccgatctgtgtttcctggagggaactccccatggactgatggatgtgatgggacttcgcagtacagagattgacggtttgtatgatggggaatataatagaggagtaccggtgaggggaaatgagttgtgcctgacgaaaacctatacctgtaatcatctttgtgaactggttaagacttctactgcacagcctctgatgacctacgaaaccgacttttatgccggtatgccggcacttaccgtgaatcttttcggaaaaggaaaagcataccatgtctgcgcagactttgaacagggattttatgatgaagtttatcgtaagattgcaaaagaagcaggcgtaaaacgtgtagttgcccacatcccggaaggcgtggaagtaagtgtgcgccggaatcaggatacagattatgtatttgtacaaaacttcaaccgtcagccggtagaagtcaagttgcctacagaacagtatccggtatggcttggaaaatatgatggcactatagatcggttcggcaccgtggtattaaaaggaaaggcaggagaaaaggaatgattcaagagagcattgtaaaactggtacagtatggactggcaaccggtctggtagaaaaggaagacaagcgttatactacgaataaaattctggaattactgcagatggatgcaatcgatgaagaatatgtaaaacagattctggagtctgacggagcagatcagagtgtggcaggtgaactggaaagcattctgggagatatctgtgactatgcatatgaacatggtctgatggaagaaaacagtgtaggttatcgcgacctgtttgacacaaaagttatgagccttctggtagaccgtccaagcaatgtgatccgtcgcttctgggaattgtataaagaagatccggtaaaggctaccgatgcacattacaaattcagccaggacaccgattatatccgtcgttaccgtatcgcaaaagatatgaaatgggtagcaccgacagaatacggtgatctggatattaccatcaacctgtccaaaccggaaaaagatccgaaagccatcgcagcagcaaagctggcaaaacagacatcctatccaaaatgtctgctttgcatggaaaacgaaggctacgcaggaagactgaaccatccggcaagacagaaccacagaatcataccggtaaccatcaacaacagtgagtggggattccagtattctccatatgtatattataacgagcattgtatcgtattcaattctcagcatgtaccgatgaagatcgaacgtgcgacatttgcgaaattgtttgattttgtaaaacaattccctcattattttgtaggttccaatgcagacctgccgatcgtaggcggatcgatcctgagccatgatcattttcagggtggacattatgaatttgccatggcgaaagcaccggtggaaaaagaagtagcgatcccgggattcgaagatgtcaaagcaggcatcgtaaaatggccgatgtccgtcatccgtataagcggtccggacacggagcgtctgatcgaactggcagacaagatcctgttaaagtggagaggatacactgacgaggcagcatttatcttcgcggaaaccgacggagaaccacacaataccatcaccccgatcgcaagaaaacgtggtgatatgtatgagatggatctggttttgaggaataatattacgaccgaagaacatccgctgggtgtttatcatccgcatgcggaactgcaccatatcaagaaagaaaacatcggtctgatcgaagttatgggcctggcagtgcttccggcacgtctgaaaggtgaacttgaaggtctgtgcaaagccattgtggcaggcgaagatctgagaaaagatgaagttctggaaaaacatgccgactgggtagatgaactgaaagaaaaatatactttcacagcagaaaatgtggaagagattctgaaaaaagagatcggcattgtattcaagaaggtgctggagcatgcaggagtgtacaaatgcacagaagaaggcagaactgcattcatgagatttattgacagtctgtaaaagaaaataacgatttttatataatactttggtaaagtgttataaaaataaagagccgggttgacaacagcaatccggctccttataataaaagcattaacgaaactacatatcgagccaatagaaggttgcaggaaagcaggcgaaagcccgccgaaggaataatactctcaggtgtccgtgaaaaacggacgggactgtaaccggatggccctctggagaatcccaaagatgggtgccgaaggtgaaagcagatctgtgatctgcgaatctctcaggcaaaaggacagtgtgaaagatacaaaaaagaaaagcggcatgtcgcagttgttttttgtgtttcgagtggataatgaataacaattctgaatagaacctgcaaaggcgcagaacagttatggaagtatcaggtcccggggatttccccgggaccttttttgtcggaaacgctgtactggtttcaggtgaataaaaaacgctctgcaaggatatgccccggcgcattctttggtattggcttgaaacgtaagaaaaagtgagggagaagaaaaaacatggaatttgttacaaaagtagttgagtgtgtcaatacgtttctgtgggattatgcactgctgatcctgcttctgggagccggtatcatttactcgttcagcctgaaatttattcagatacgaaagtttggtgccggaatgaaagcattgtttggtaatttttcgctgcatggcgggaaaggagaaaatggtctcagttcttttcaggctctgacaacagcgattgccgcccaggtaggaaccggtaatatcgccggagcagcaacagcgattgcatccggagggccgggttccatcttctggatgtgggtcagtgcattcttcggaatggctaccatctatgcggaagctgttatggcacagcatacaagaaaactggaaaacggccactatgtaggaggcccggtatattatataaaatacgtattcaagggcagatttggaaaattcctggcaggtttcttttctgtagctatcattctggccctgggatttatgggaaatatggtacagtccaactctatcggtgcagcatttaacaatgcattccatgtaccgaaactggcagtgggaatctgtgtggcagtgattgccggcatcatctttattggcggtatcaagagaatcgcaagctttacagaaaaaatcgttccgatcatggcactgttatacatcatcggttgccttgtgatcctggtgatgcatcttccgggagttggaactgcattcaaagacatttttgtgggtgcttttgcaccacaggcaatcgcaggcggtgcacttggtgtaacggttcagaaagcgatgcgtttcggtgttgcgagaggacttttctccaacgaagcaggtatgggttccacaccacatgcacatgcaacagcggaggttaaggatccgtgtgatcagggaatcatcgcaatgatgggtgtatttatcgatacatttattattctgacactgacagctctggttatcctgtccaccggagtacttggtaacggacagacaggttctgaactggcacagagtgcattcaacgtaggattcggtaactttggaaatatctttattgcattgtgtatgctgttctttgcctttactacaattgtcggatggtattatttcggtgaagtgaatgttcggcatttgttcggaaatggtgcaataaaagtttatgcagtgatcgttgtaatctgcgtaatcatcggatccacattgaaagtagatctggtatgggatatggcagatatgttcaatggtttaatggtgcttccaaacctgattgcacttcttggatgtctggtgattgttcgcaaattgacgaaaaagagcgaaaaaagcaaagaaaaataatggaatatagacaaaaacagaaaaatccgctttggggaaagaaaccaaagcggatttttttgaaattggttaaattgtacttgatttttataaaacaatggtataatatataaacatgacgaaacaacatttaaacaatacgtcaaaatcaccagaaacaacaaggaaaagtgaaaggtattgtacgaaatgttcacgatagtggggtgacaaactatataatgtcgtgagcgaaacaaaagattccgtagttattatgacgaaacacaatattaagaaaaattgtgaaggaatgtagattttcgttcgtgttcatacggtaggcgccagcagagtttttctgaaaaaagtagtatgggcagaaggaaaatttatatagagacaacggaagattgacgaatatgatgttgtctgagttattttcaagacctaaagggagggaaagagatgaaaagaaaaatagttgcagttttaacagcagctacgcttgcagttggtatgttagccggctgtggcggcggcggaagtgattccagttccggcggatctacggattccagtggaacaacttctacagatgacagttcaggcggaagcggaacagcagcatctgaaggtattactacagaagtaggaactcctcgttccgagacactgatcgttgagtgtcagtcaccaacagatgtacctggtcagtttaatagctacatgacaggtacccagatgggattcggtattcatcagctgatgagtgctcatctgtgggaaatggataccgcaaatggtgaacagtggggcgagattgctgatggcatgcctgagtccaatgatgattttaccgagtggacagtaaaagttcgtcagggtatcaaatggtccgatggtgaagacgtaacagcggatgacgttgtctttactttcaatatgattaaagaaaatgacggaatcggtgctagtgcagcaacaaacctgtacattgattcagtagaaaaagtagacgattacacagttctgtttaagatgaaagaatcattcccacgtttcgtacagagatatggtatcactgtatggggaactgattaccgtatcgttccggaacatatttactcaaaacagtccgatgttactacattcaaggatgaagatcctgtagtggcaggtccttacaccgtaaaagattacgataagttaggtgactgggtgctgtatgaactgcgtgatgactggaaggacagcacacttggtgttgcaggacccactcagtatgagtacgctgaaaatgctacaccaccgaaatacgtatggttccgtacattcgcagactctaccacaaaacagatggctatgatcaacaacgaagttgacctgctgtgtgaagtaacactggaagagtttgaaaccatgaaagcttctaacgacaaaattaactgctggtacaaggatttcccatatgcaaacccagacgatccgggtgcaaaaggaattgtattctcacatggtcagggcgcaccgtatgacaatgcagacttccgttggggtatctgcttagcacttaatattgatgagatctccatgaacacgttctccggagcaggacgtgcggctccgatcccgttaatgaacaatacacagttcctgcaggaaacctacacaatcccaatgcaggattggctggaaaacttcgaactggatcttggcgatggaacaaccttcaaaccttatgataccggttatgcaaaacgtatggctgattctctgggcatcgaaggaacagatgaagaactgattaccatgtttggtgcaggctggtggaaacatgatgaagaagcagctacaaaactgcttgaaaaagccggtcttgaaaaagtaaatggtgtatggaattatgaaggcaaacctttcacctttgaaatgagctatctggcagatactgagttccaggaagcacgtggtgtacaggcagcttacaaccagctgacaaaattcggtttccagtgttcaatcgcatccaaatcttccgcaacatgggatgtagacggtggaaagggtaactaccagatcgctggttactggccatccggtggtatcctgaaagacttctactctgcaatcagcggatttgacggtgatctgatcaaacctttaggcgaaactggttctggtcagggacttcgttggaataacgaaaaagttacagagatacttcacgaacttgctaatactgatccggaaagtgatagatcttacgaactgcatactgaattccttaaggaatgtgtaacagatatgccggaaatcaacttcctctctggtacaaaattcgttccgaccaactcaacttactgggaaggttatccggatgcggacaacccgtacaatggtccatggtggtggtggagctgcttcaaatacatgcttccaaacatcactcctacacaggcttaatcctttaagtctttaggaacagtaataaaatgatgaaaacagcaaaaactgacagagttatttgctgaaatatcagaagggacggagttgtaagaaaagcttacgatccgtcccttttgtgtagaaatagtagtaaaggagtgctgtgtatgaaatttaaaaaattctttctgcagcgagtgcttgcatgggcgctgactatcctgatcggtgttacctttatcttcttcattccacgtatgtttccgtcagatcctgttgaaaacatgatcgcacagattcagtcacgttccggtaacatggatccagccgagatggacgcccttcgtagtagcctgcgtgtgcagtttggacttgatggctcgttgctgcaacagtatggttatttcctgtggcacggtctgctgcattttgactttggtccgtcactgatgagttatccggagccggttggaaaaattatcggaagatatcttccgtatactctgatcttatgtctgacctccacatttattgcgtggatcgtaggtaacctgatcggtcttctggcaggatttcggaaaaataaaacttcatccaagattttggaagcaattgcaatttttatttacccgattccttacttcctggtagcgttgatcttacagattatatttgcatttatattaaaatggttcccgttgcaggcagttattaatactaaaggtggatttggtccttggatcacttctgtggtcaaggcttctatccttccgggaatctcactgctgttacttggtaccggatggtggatcatctccatgaaatctctggcgagcaccacagcagaagaagattatgtacgttatgcccgtttccgtggactttccgagttcgctatcggcaaaaactatgtaatgcgtaactccattctgacccagatcacagcactggcaatgagccttggtggtgtcttcggtggttccatcatgaccgagattattttcggataccctggagtcggttctctgattcaggccgcgatcctgcagtcggattataatatgatccttggctgtattacgatttccatcgtagcgattgcttcagcaactttaattgtggacctgatctacccgttcatcgatccgcgaatccggtacggctgataagagggagggacagacatgaagaaattttggaaaacagccaattttcgtttaaaggcaggcttgatttctacttgctttttcctgatcattgggttcgtagtatattttatcccacatacaaatccgtttacctataatacatacccgaataatctgggagtttctgctgaacattggcttggaactaccagtatgggacaggatattgtatggttgctgatcgaagccattcacaattctttgatgattggtctgatcgtagctactattggtactgttgtgggtgttctggttggtctgcttgcaggttttgcaggcggcgcattggacagagtgctgatgattatcacggatactttcgtagtaatcccgtctctgccgattctgatcatgatgacttccctgatgaaaggaagctctactgtaattgttatggcacttgttcttgcgatgttcgcctgggcatggccaagccgtcagatccgttccatggctctgacaatcaaagagcgtgactttattcacacagcacgtttctccggtgaaagtaccttacagatcgttgtaacggagattctcccgttcgcactgtcctggtcactttccaactttatgaatgcaacactgagtgcaattggttcagaatccagtttggccgttctgggtctgtcaccgggaaacctggtttctcttggtaacatgattcagtgggcaagaggatacaatgcagtccttgctaagagatggctctggatcggttctccgattgttgcaaccgttatcttatttgttggcctgttcatgttgattacaggttacaacgattatcaggctaagaagagaggcaggtgataggtatgctgaaaatcgagaatttgtcaacgtcttataagacaatagacggtgatgtacatgtactcaaggacattaactttgagattaaagacaatgagatcttcggcatcgcaggcgagtccggatgtggtaaaaccaccctgctgaacactctttatgatattgttgactatccgttggtgatcgatcaggggcgtgttgttctggaaggtgaaaaagacggaaagaaatattcattcgaatctggaaagattcgtgacacctggtggaacaatatcgcatatgtgccacaggctgcacagagtgttctgaacccgatcgttcgtctgaaaacacagtttctggattctattccaaaggaccagaaaaagaatgaaaaaccggaggaaactctggtaagagttgctgattatctgaaagaactgaatctttccccggatgttctggagtcatttccattccagctgtccggtggtatgagacagcgtgcgatcattgcactggcaacctttatgtctccgggtgttgttctggccgatgagccgacaaccgctctggacgtagttgtacagaagggtattcttatgatgctgatgcgtctgcagaaacagttaaagaatacaatgatcattgtaagtcatgatatgggtgttcattatcagatcacagaccgtatggcgatcatgtattccggtagtattgcagagctcggtaagacagaagatatcttcaatgatccgattcatccgtatacaaagatgttggtagatgctcttccgcgtgtaggtgaggatgtacagcgagttggtatcgcaggacgtccgccggcactgaagaatccgccgccaggatgtcgttttgcacctcgttgtccgcatgctacggatcggtgccgcagtgaagtcccgaaattccgggaaataagaccgggtcgtttcgctgcgtgtcacttattagaagaggaggtgaagacgaatggctgataaattattggaagtaaaaggcgtcagcaagattttccgtgtaggtggtatgctgcgtggtaaaaagctggtggctgtagataatgtttctttatctatcgatgatgataaaccggtaatcctgtctatcgtaggagagtccggttgtggtaaatctactttatgtaagatgattcttcgtcttcataacccggatatgggtgacatcgttatggatggaaaatcttatgcagataaaaaaagctatgatccaaaacagttcaaactggatgtacagccgatctttcagaatccatacgaatctttctccgcaagaaagaccgtagatacttacctgtataacactgctcttcgtcttggcatcgcaaagaacagagcagaagcagataaagttgttgatgaagcattaaagagtgttggtatgtctctggcagtcgtaaaaggaaaatatgcgactcagttctcaggtggagagctgcagcgtgtatctatcgcgagagccctgattacccgtccgaaactgatcatcgcagatgagcctgttgcggcaatcgatgcatctatgaagatgaacatcgtaaacctctttaaagagctgcgtgacaaatataaaatctcatttatttatattactcatgacctgtcgactgcatactatgtatccgattatatcgcaaccttgtatcgtggctgcctgatcgaatacggaccggcaaaacagatcatggacaatccggcacatccttacaccgaacttctgatgagttctgtaccccgtgtcggagacaaatgggaaaaagaaattgccatgccggatatggaaggaaaagaatatgcagtggaatactgtaagttcgctcctcgttgtccgtacgcaaccgatgaatgtcgtcagaaacgcccggatgcaaaagatatgggcaatggccgtatggtactttgctgtcaccctctgtgtcagcagacaaaagaagcgtaagataagcttgtaaaacataaaaaggctgtcgccttcgaaacttgtgagagttccggaggcgacagccttttgctttacgggaaattgctttcctgtaaagtaaaaaacgctccgcgaggatgcaccaaggcactagagcgtgtctgaaaaatcatttccgcaatctgcaagccccactttgcggtatattttaccctcattcggttgccgtagcccgctacgccgccctcattcggataaaatctcccacaaactgagactcgcagctcacgaaaagcctttttcagacacgctctagggctgttttagttttagcaacaatttatcatgggaaaaggcggataacaggatttgacatatgatggagtgggaaattgataataaaaaactcccgaggattccgatatttggggaatcccagggagttttatgatctcagactatttcaaaaagttcgaatatccggaagattagaacagacctgtgatctttcctgtctcgtctacatcgatcttctcagcagccggtactttcggcagtccaggcatggtcatgatctcaccggtcagggctacgatgaagcctgcgcctgcggaaactttcaggtttcttacggttacttcaaagtctgtcggtgctcccagtttggtctggtcatcggtcaggctgtactgtgtcttagccacacagatcgggcagttgccgaagccaagagcctctaactgttttgcctgtttctgagcatttgctgtcagaacgacacgttttccaccgtatactttctgtacgatctggttcagtttgtcttcgatagaaccttccagttcgtaagcgtatgtgaagtcgtttggttcctctaccagacggatcacttcttctgccagtttcaggccgccttcgccaccttttgcccatacttcagacagagcaacgttaacgcccagctctttgcatttttcttcaaccagatccagttctgctttggtatcggttgggaatgcattgatggcaactacgcatggcagtttgtatacattcttgatgttgcttacatgttttaacaggtttggcatacctttttccagagcttccaggttttctgcattcagctcggctttcggaacaccgccgttgtatttcagggcacgtacagttgctacgataactactgcatccggtttcagtcctgccatacggcacttgatatccaggaacttctcagcacccaggtcagcaccgaatcctgcttctgtgatcgcatagtcagccagtttcagagccatcttggttgctgttacggagttacatccgtgtgcgatattggcgaatggtccgccgtgtacgatggccggtacaccttccagtgtctgtaccaggtttggtttcagggcatctttcaacagagcggtcatggcaccttctgcatgcaggtcgtgtgcggttaccggcttctgttctgccactttaccgtatgtatatccaatgatgatacgtcccagacgttccttcaggtcgttgatatcgcttgccagacacagaactgccatgatctcagatgctactgtgatatcgtagccgtcttctctcggcataccgttggtttttccgccaagtccgtctactacattacgcagctgacggtcgttcatgtcaacacaacgtttccatgtgatctttctcgggtcgatgttcagagcattgccctggaagatatggttatcgatcatagctgccagcaggttgttggctgcaccgatggcatggaagtcaccggtaaagtgcaggttgatgtcttccatcggaactacctgtgcatatccgccgccggctgctccaccttttacaccgaaaaccggtcctaaggatggctctcttaaagcaaccataacgttcttgcccattctctgcataccgtctgccagacctacagttgttgtagtctttccttcaccggccggtgtcgggttgatagcagtaaccagaatcagtttaccatcttttttgtcagattctttcagcagattgtagtcgatctttgctttgtactttccgtactgttccagatatttgtcatcaatacctgcttttgctgcaatctcggtgatcggtttcatttcgcattcctgtgcgatctcaatgtctgttttgtatcccatagttatttctcctttcttctgaccggacgtctgcccccgaaacggaacaaaaagtgaagaatgtatctgttccgtaaataaaaaaacgcagcaaatgtaatcatgttctacattgctgcccagacggtcggccaatatgaatcctggtttcctgtggttcctccacatatccgtcagtagccaggatcttctttttcagacttcttttaaagaatagcataaattagcaaaaaagtcaagaattacgaggaaaaaacaatctctttttgtggattttcacttgatatttatgaggaagaaagttatacttatacggtaacataattgttactgttcactgatactatcttgcgaggtgtttttttgtgagcgaaggtcacagaaaacccgagacatacctcacgaatttatgcgattagtatgaattctgtgcatcgcaaagtgtgtaatggtgagataccttgaaaaacaaacgtgatcactattaataaagaagaaagccggtgatatttgtggaacaggcaatcagggaggcgatattttccggattctgcaggacgtataatcaggcacagacagtgacctgtgagttcacagagacggaagaaggactcgaactgaccgaagtggactgtggatatagacggtgcatccatcggggcagctgtgaagtggccaggcagatccgtcagatggaagaggatcacaaaaaggagtaaaggggaaacaaatggtaaaactgaataagaaaatcaggagatatctggctctggttctatgcctcagtatcttgcttgtacctgtagagggttatgcggcgaagaataatcagagcacaaaccagcgggtgagaaccacaacgacagcagcaggctgggtgtccagcggcggccgatggtggtatcgaaatgcagatgggagttatccgaagagtacctggaaactgatcaacggttcatggtattactttgaatctgatggatggatggcgactggctggaaaaaactgggcggcgaatggtattatcttacatccagtggagcgatggctaccggatgggtgaaactgaatgggaaatattatttcatgaacggttccggtgtgatgcagcatgatacctgggtggataatggtgcctactatgtgaacagcgatggtgtctgggtggaaggaaagacttcccagaacagagcagaaagcagtcggacagattccacagcaggatgggtgtccggtggcggccgatggtggtatcgggaagcagatggttcctatccgagaaacagctggaaagtaatcaatggttcatggtattattttgacggcagcggctggatggtaaccggctggctaaaacgcgcaagcggctggtattatctggaaccgggcaacggtaacatggtaaccggctggagaaaaatcggcggaacctggtattatctgaatccgggaaatggcgatatggcgcagggctggaaaaagattgggaatgtctggtattatctggagccgggaaatggtggcatggcaacgggctggagaaaaatcggaagtacctggtattatctgaatccgggaaatggcgatatggcaacgggctggacaaccattggaggaacccgatattacatgaatcaggatggagccatggtagaaggctggtcacagcaaaatggaacctggtattacctgaaaccgggcagcggaaacatcgcgaccggatggttaaaactgggtgcaacctggtattatctggcgagtgacggaaagatgctgacaggtttccagaacatcggcggatccaagtattatctgaacacaggcagtggagccatggtagtaggctggctgcaactgggcagtgactggtattatatgaacggcagcggtgccatgctgacaggctggcagaaaatcggaagtacctggtattatctgaatccgacgaccggtaagatggcaacaggctggacaaccgttgatggaagtaaatattatatgaacggcagcggtgccatgctgacggactggcagaatattgacggttcagagtattatttttacagcagtggagccatggcggtaagtacagtcatcggcggtgttgaaatcggagcagatggaaaagcatcgagaacagaaagtcaggcgattgggactctgaccaagtttttgaaaacaatgattcagccggtaggtaacaccctgtatgtatggggtggcggtcatgacgcctggacagacggagacggactgcgtatcggtatgaacccgaagtggaaacagttctataaccagcagggagcttcgtataattatacgaaacatcgatatgagtatcagaatggtctggactgttccggtctggtcagctgggctgtctacaatacatataatacgaaatcaaatcagaaagaaacggcatacagttcaacatctaccggatttccggcttatctgaccaacaaaggttttggatcgcacggaagagtttccggtggaacatttacacctggtgacgtggtaagtatgaccggtcatgtgtgggttgttcttggcatgtgttcggatggaagtttggtgatcgttcatgcgacaccaccggtagttcagatcagcggtacggtcaatacagcaggaagcacgaacagtgaggctgtaaaactggcaaatgcatatatgaagaaatattattcagatgcagccggcaaatataatctgtgtatcgcaagtaaagcatatgtgaataacgtagaccgtttccagtggtcctccggcagtatgagagatccggatggactgcgtaatatgacggcagcacaggtacttgaaaaattgattggactgcaataagaaaaatgtaaagaaaggctgtcgggaaatagacagttctaagtttgggagggtgtgactcataccgaggcacaccctcccaaactttttatcatacaaagaaaaaagatgactgacgacaaccatctttctctccatttattgagatgagtttagtattgaggggttgcaggaaaaatggttttgtgttaatatgttaaggaatgtaaagagaatatttcgtaaatattacaagaatatataacacaatgcaaaacaataaaaggagaaatgtatgaaaaaaagaatcctttgtttaacattaggattaatgctgacaatttcacaggcagtacctgccggtgctgcatccagaaaagatcagttaaaacaggataaggcagcagcacagagtcagcttgcagcacaggagtctaaaatcaataatctggaagaccagaaacagacactttctgctgagatcgatcagctggattctgatctggtaaatattatggttgagattgagattctggatggtgagttatccgataaagaagcgcagatcgagcagaccaaagcagatctggcagtggcagaagaaaataaacagaaacagtatgaagccatgaagaagagaatccagtatctgtatgaaaagggtggagatgatgcatgggcacagatgctgttccaggcatcggactttaccagtcttctgaaccaggcagaatatgtacagcagatgtatgacagtgacagaaacagtctggaagagttcaaagagactgtacagcaggtaaaagaccttggggatcagctggacagtgagaaagcagaactggaagagatgaaccaggagtatcagaatcgtcaggcgagtatgcagactcagctgcaagaaaagaaagcaacttccagtgattatgatgcacagatcgcacaggcgcagagccaggctgcacagtacacggaactgattcgccagcagaatgctgagattcagaaaattgaagaagaagagaaaaaagcagcggaagaggcagcaagaaaagcggccgaggaagcagctaagaaggcagcagcagaagaagctgcaaagaaagcacaggaagaagcaaacaaaaaagcagcagatgaggcagctaagaaagcagcagaagcaagcaagaaatcttcctctacttccggcagtaatacagctgcaagttccggttcttccacaagcagtaaaaacaatacatcaggcagcagctcaagtgcagcaacatccaaggacaacggaagttcttcttccagttcatcaggaagctcaggcagcagcgtatcatataatccgacaggacagtccgttgttaattacgcatgccagtttgttggcaatccttatgtatggggtggtacaagcctgacaaacggtgctgactgttccggatttatcatgagtatatatgcaaagtttggtgtatcccttccgcattcctccggagcaatggcaggctgtggtcgtggagtttcctactctgaggcaatgcctggagatattatctgctacgcaggtcatgtagcgatctacatgggcggtggacagatcgtacatgcaagtaacgcaaaagacggtattaagatcagcggaaacgctgcgtacaggccgatcgttgcagttcgccgtgtgctgtaatcagaacaatagtaataattatgagagccatatctgaaaaagatagggctctttttttgttcaataatctattccactttaacgtggcattttattgtagttccgaatttgacaaaataaatgatggaatcaacacaaaagaacgagccgataaaaaaacgaatcgttataattagaataaaagagactgagacagtctgtatgcagacggaacaggctacattgccggaaggaggtagataatgaagaatcgaaaaaaacagcttatgaagatcggagctgtcatagcggtgattgcagttgcaggaattgccggcggagtcgtcatatacaagtgtgccaatcgattcgatctgactgtagccggtgatccgatcagtaaggaagagtatgtgaactgcatgaattccgtggaatatgatacaaagatgcagatccaacaggattatgatgccgtatacggaacggatttctgggaaaagcaatacgacggacaatacggctatgagatcctcacccggaatacagtagaacagttaaaatacatccatgcagtatatgatcttgccgaagaaaacggagatgtagcagacagcagctatgaggctctggaaaaacgctggaaggatggtaatgcggagcgaggcgagaaagtaaaaaaaggtgaagtgatctacggactgaaagagtatacctttcagctgtatctggactatgagctcagtactctgaaagagaaatactgtaacgatacatcccgggagggaatgcaactgacggaagacgaggttcttcagcactaccggagtcgcaactggatatttggaggcagcgaagaaaacgctgacctggaaacagcaagaatagcagtcgaaagagaactgcgtgaacaaaaatacgacgatatgatcacgcagcatgaaaccgattctcaggtggaaggaaacatgaaagatgtgaaccggtacaccttgaagaatatacaataacggaaggagaaaaggtatgaagaaaagatggatgagcggtacgttagcacttctgcttgcaggaacaacagtcgcatcaatgatgccggcagtatctgttaaggctgagggaaataccgcaaccggaacaacatattatgttgattccaatgggggaaatgatagcaatgaaggaacatcagaaggcaaggcgttccaaacacttgaaaaagtaaatacacttgatcttgagccgggagataccgttcttttgaaaagaggatctgtatttgaggatcaggctcttaagtttacaaaagaagatagcggtactgcagaagcaccggtaagaatatctgcttatggcgagggaaacagaccacagatcaatacaaacggtcatggtcagtgggaactgaattatggaactccactggataaccagaatcataagtggaaaggtaccgtatcttccagtatcctgattgaagacacagagtatatcgagatcgaaggtctggaactgaccaacgacagaaatagtgcaacagataccgagaaagataaagcgtacaacgatgcatatgcaatggacagaacaggtgttgccggcgttgcgaaggacaatggaacagtagaccacatcgtactgaacgatctctatatccataatgtgacaggtaacgtatataacaaacatatgacaaacggtggtatctacttcatcgttgcaaaaccaacaaacgaaggagcaaccggaattgcaagatacaatgatgttaagatcacgaactgttctctggatacagtaaaccgctggggaattgcagtcggatacacctatcagtggagacaattcacaacaggtgcattgtcagatgcaacaatggcaaaatatggttcatccaatgttgtgatcgagaacaactatctgaaccatgtaggcggagatgccatcacaaccatgtatctggacagaccgatggttcagtataacgtgtcagagaatgcggcagagcagatcaatttcaaagactactcaaagaatcagccgagtcttgatgcaaatggtaatgtaaacggtacacagggcgttggtgcaggacgagtggcagcagcaatctggccatggaaatgtaaaaatgcaatcttccagtacaatgagtgcttcagaacattaaatgcttccaatggtaacggcgatggacagccatgggatgccgactatggtgatggaacaaactatcagtacaactacagccatggtaataccgcaagtaccatcatgttctgtggtccggagtccattaacaatacattccgttacaacatcagccagtatgaagatatgggacctctggatccggccggtaacactggaaactgccaggtttacaataacacattctatatcaaagaaggtctcaataccatctggcatagaagccatggcaatggtggtcctgtagatatggaaaataatattttctatttcgcaggaaactcaccggttgcagtaaatgactggaatcccagcggaaataagaccttcagcaataacttatattacaacgtaactacttatccgaatgatgcaaatgctgtaaaagcgaatgcaggaacaaaggtacttgtggatgcaggttccggtccggattcagtagcaactgataagagcgcaagaagacatgaagatccaacagctacaacagtatttgacggatacaaacttgcagaaaactctccggcaatcaacgctggtaaagtagtagttgacagaaatggttataccatcgatcacgacttcttcggtcacaagatcacagcagtaccggagatcggagcagcagaaagtgatgcagtggcagcacttgtactgagatctgacgtatatactgttaccggaacaaacgtaagcgatcttcctaaaaatacaacagtagaggattttcttaataatgttatcgtagatacaggcgttacaattactattaaagaaggcgagacagaacttacaggaactgacatcgtaaaaggaggagcgacaattactctttcttatgaaggaatgaaaagtgtaacttacactgtggttgcaagttcggataaagaactgaaagaatgtttctacgaagtgaaaggatcagaagtacgtgttccttacacagagaaaaacccgacaacagtaaaggaaatgaaggcaaacatcactgtagcagatacagcaacagtatccgtattaaacggtggtgcagaacttgcagacagtgatgcagttgcagacggaatgacacttcgcatcactgcggaagacggcacaacaaatgattttgcgatcaaacagaaaaacgaatataactggacttttgattttgtaagaggacagcagggaaatgtatggttcggacagataaaggatagttccagcgactgggccaatatgacaaccatcgattcggacggatggccaaactgggcgactcatacatattatggccctggtattgatgcaccacagaacacaaatacaacaactgattcaacagttcatggtctgctttccgcaccgccaaaaacagatatttctacagcaatggcatatagagcaccgaagagcggaacagtatcattcaaggtcaaagatgacgagccatatctccgtcagtctccgaacgcaaacggaacagtcaccttgagtctttatgtaaatggtgaagtgaaaaaaagcttaacacttgaaaccagtagacagaaagttggtaactgggaacaggctgaggaaatcgtagtaagccgtggtgatatgattcgcgtggtagctaagtgtaatgataacccaagcaaaccatccgctcacgttacaccaatcatcacttatgtggataaagcagcagctgataccgaagcaccgacagcaccaacagaagtaacagcaacagatattacaacaacaacagcaaaagttacctggacagcatctacagataatgtaggcgtggcaggatacaatgtatacgtaaatgatccagaaaatcctgtaaacggcgagacacttgtaacaggaacagaatatgaactgaaagaccttacagcaggaacaggatatacagtaactgtaaaagctgttgatgcagccggcaatgtttcagatggtgctgcacatacatttacaacaaaaaatgcggcagatacagaagcgccgacagcaccgggaaatgtagcagtgacagatgttacaacaacaacagccaaagttacttggagcgaagcaacagacaatgtaggtgtagttggatataacgtatacttaaacgaagaaaaagtaaacgaaacacttgtaacgactaccgaatatgatttaactgctcttacagaagagacaaattattcagtaaaagtaactgcggtggatgcagcaaaaaatgaatctgcgagatctgaagcagctacatttacaacaccaaaaacacaggataccgaagcaccatctgtaccggcaggtgtagcagcatcagaggtgacacagacaggagcaaagattacctggacagcatctacagataatgtagcagtaaccggatacaatgtatatgtgggtgaaacaaaagtaaatgctacacctgtaacagttacagaatatgatttaaccggacttacagcaaatacaggatattcagtaacagtaagtgcagtggatgcagcaggaaacgaatccgcaagatctgaagcagctacatttacaacattagaggcggaagaagagaaagatacagaagcaccgacagcaccggcaggtgtaacagcatcagaggtgacacagacaggagcaaagattacctggacagcatctacagataatgtaggagtagccggatataatgtatatgtagatgaagcaaaagtaaatacggacaagctggtggaaggtttggaaattgaactgacaggtcttactccggatacagaatacacagtaacagtaagtgcagtggatgcagcgggaaatgaatcaggaagatctgcagccttcacatttacaacacttaaaaacgaggaacctgccccggaaaaaccatccgctcctacgaatgtgaaagtatctgaaattactcataccacagcaatcgttacctgggaaccggctgcagaaagagcgatggcacctggatataatgtatatctggataataaaaaacagaatgaattgcctatagaaggaacagagtacaagttgactggccttaaggtaggaaccagatacaatgtagccgtaacagtagtagatgtagatggaatagaatctgacagaacagaagaagtagaagatacatttataacaaaggcagataaagaaaaactgcaggaaactacaaaagatgcagacaaagctctggagaacaaggataaatacacagaggaatctctgaaaaatctggaggaagtctacaagaagtatcaggaagtactgaatggtgacaatgtaactcaggaagaagtagaggaagcgaataaagctatcgaagaagctttcaagaatctggtagcaaaagacgatggtaagaaggatccgactcctaccccaggaccggcagccccaacaccgactacaacgccagacccgactacaaccccaaccccaactacaacaccaactacaaccccaaccccgagcaccacaccgcagccaggcgcaaaacctgcagcaacttccggaaataccaacacaggaagcacaaatgcaggtggaacaaccacaggcagcacatctacagccagagctgcaaaaacaggtgatacagccaatgcagcagcctggttatttaccctggcagcatctgcggttgcaggaactgttgttgtaaaacgtaaaagagaggattaagaatgtcccactcttgaaggataaaaataagtaattaaaacagacaggaatcagaaaacactgattcctgtctgtaacatccaacaaaaaggagaaaaaaatgaggaaaaagaccctttcagcatttctgggattggttcttggcgcttctaccatattaggctctgtcggtgcaaaccctgtaccggtatccgcaggaacggatggaataaccgacagcgaatgcacaaccactggaactgcagaaccggcatcggacgaagttgtaccggacgcgaatcagtacaaatatcagaaggatgaactggcagcattctgtcacttcggaccgaatacatttaatgaagtagagtggggagagcattacggaaagaaacaaccaaatgaaatcttcacactgacaaatgattttgatgcagatacattagtaggcacattacataatgcaggatttaagaaaatcatcgtaacagcaaagcaccatgacggattctgtatctggaacagcgaatacacagattactgtatcaaaaatacggattataagaatggtaagggagatgttcttgcggaaatctcagctgcctgttcaaaatatgatatggacatgggtctttacttgtctccatgggatatccatgaaccatcttacggttattatgatgctaatggaaatccaacaaccaaggaaaatgacgtattagattataatgagtattataataatcagttaaaagaaattcttggtaattcaaagtacggtaacaacgggcattttgttgaagtctggatggatggggccaaaggaagtggtgcaaacgcacaggaatatacatttgaaaaatggttcgatacaattcagacacaccagggaataaaagccggtaatgctgctgactgtatgttattcggagcacaggcatatacaaccgttcgctggatcggaaatgaagatggtgttgctcacgaaaacacatgggcaaaatccaaagtaaatgtggcaaataatacaattgatagcaacggaactacaccatataccatcggatacgcagatggaaataaatggacagtaccggagtgtgacggacgtattacatccggatggttctggggaacaaataaatgtactccgaagacagttgcccagcttgctaacatgtattttgattctgtaggacataatgcaactatgcttctgaatgtaccgccaaacaacaaaggtacagtagatcagccgatcctgaacagaataacagaattcggtcagaatgtggaagagtctttcagaaccaatctggcaaaagcagaaggaaccacaattgtagcatctgatgttcgtggaaacgatgctgcattcaaaccgggaaatgtagtagatggaaatgatgccacatactggacaacaaatgacggcacaacaagcggaagcctgaccattaagtggaacacagcgaaaaagtttgatgtggtttctatcgaggaagcaattcagaaaggacagcacatcaacagttataaagttgagtacaaagcatctgacgatgcacagtggcagacactgaaaagcggagagactgttggatccaagagacttgtcagaaccgcaccggtatcagcaacccaggtgaaaatcacagtaggaacaaccgatggaaaagttccgatgttaagtgaagttggtgtatacaaagcaagcgaaggattccagctggcaggagcagcgccggaaggtatggtaacaaccagcgtcaatgaagcaaacagttttacattcagtacaggttggaatccacagacaggaagccagtatatcaacggacagaatacctggtccaatagagctggcgcaagctttacttataagttccacggaacaaaagtatacctgatgggaacaacagacccgggtcatggtgccgctgatgtttatatcgatgatcagttggtagaaacgatcaatacacatgcggaaagcagatctacaggagcaaagatctttgtatccggtgatctggaagatggcgatcacacattaaagcttgtagcaaaaacaaatgcagcaatcggtgtggaagcagcttacgtaatcaacaacggtggcgttggaatgattgaacttgaagattctgcatatacaatgaatgaagaatcttcgctggatgtgaaaatcaaacgtgtaggtggaacaacaggaacaatcacagctaagattcagcccaacccgggaagtgcaattcaggatgattttaatacagaattagctccggtagttactctgaatgatggagaagctgaagtaactgttaaagcagcagagacaagacgtaatacgaacatgaccggcgatcgtgtattttctatcgaactgacagagaaaacaccggacaacgcaatcattggtttcaacagttctgcaagaatcacaatcaaagatgcagatggtattacaaaagaaaaactgaacactttaattactcagtctcctgacaaagcacaggaaaatctgtacatggaagaaggctggagtgcatatgcagaagcactggaagcagcaagagcagttgtcgaaaacgaagaagcaacagaagcaactatcagaaatgcatacatagcactggaaaatgcaaagaaagcacttgtagcacgtgaaaagtatacagaaattgacagattcaaattcccatggaaaccgggaacaagcgctaagctggaagcagaatttgcgacagagttaaataatagcaatgattcagattctgatccggattggccgatgaagattgcggataacaacgatgcaagcaatggaaaatttgtcacagatatggcattcaaggatgtcctgaaatatgcatatcacgcagacaaagccggcacctaccatgtggtcatgagatatcgcagcggttctcctgaagatgcccaaaatggtattaagataacagaagaaaacggaaagatcgcagaaaaaacagttgtagttaacccgtccaaagagaatggaaacgttgttttcggaactgtagagtttgatattgaagtagtaacacccggagatggaatgatttctattacagccccggataccaataagggtcctggaattgactacttcatcatcagcccgctgaatgttacgctgggatcttttgacatcacagctacagcaggtgaaggcggaaccatcacagcagatggccttacagaaggcaaagtaactgttaaagaagatgaaagtgtaacatttacgattgcaccaaaagccggatatgagattgcagacgtaaaagtggatggaacatcggtaggaaagaaaactacttatacattcgatcacgtagacagcactcatacaatcgaagcaacatttgcatttacgaactatacagcagaaaatccatttggattcccgggagaaaaggaagtgaccaagaccctggaagcagaggatgctacagaactgatcaatagcaacgattcagattcggatccggactggccgcttactattacttctgaagactgggcaagtaatggaaaattcctgaactgtatggcatacaaagattatgcaaaatatgcttacacagcagcagttcccggaacctacacagtaacaggtacttaccgtgccggagcgttaaacaaacttgcgatttctgaagcggacaataagattgaagcagctcaggttgattgcccgtcaacaaaagaaggcaacgcacttactgtgaagacattcacactggatatcaaagtgataacagcaggagcaggaaccctgatccttacagcaccggatacaaacaaagctccacagctggacaaaatggatatcgtgctgaagagaactgcagacgaagcagatcttacagaactgaaggaggtacttaaaactgcaagagaaaaacttgcagaggaaaatgcatatacaccagtatccaggggagaacttgaaactgcagtaaatgcagctcaggaagtttatgataaagcaggcgttacccaggatgaagtaaatactgcaaaagcaaatgtagaagctaagattgctgcactggtaaagaaagcagataaatctgcactgatcaatgcaattaaacttgcaaatgtcaaaacaacgcaagaggacaaatacacagctgaatccagagaagttcttaaacaggtgatagatgcagcagctgaggtagtgaatgacgaaaatgcgacacaggaaatggtagatgttcagacagccgctgtaaaagatgccgaagctaaattagtagcaatcaaagtaccggttaacaaatcaggactggaaactcttgtttatcaggcaaaagagactgtgaaagagacagaaacctataccgtagaatctctgcaggctcttcaggcagccattgaagcagctcaggcagtactggatgatccagcagcaacacaggaagaagtaaatgctcagactgatgcattaaatgctgcaattgctgcattagttgaaaaaccagtagtcgacaaaacagaactgcagacagcagttgctgatgcaaataaatttgcagcaagcgatgaaaacaaagagaaatatacagaagattcctggaaaactcttgaggaagccattacggtagcacaggccgttctgaataaaccggaagcaacacaggaagaagtaaacgatgctttaaaagctttaacagatgcaaaagaaaatctgaaaacaaaagaaccttctgttgaaaaaccggggaaagctgaacttgaagaaactgtgaatgatgcgaatgcatttgttaaaggattagaaaatccggaaatgtatacggaagagtctttgaatgcccttaaagaagcaattgcaatggcagaggaagtgctggcttctgaaactgcaacacaggatgaaattaatgctgcaatgcgaagagtaaaagaagcaaaagaaaacctggcacagaagaaaccggcagttgctacagaagctcttgagaatgctattgcaaatgcaagagaacttgctaaagacacagcaacttatacagaagagtctctggcagctcttaatgcagctgtcgacgcagcacagaaagtacttgaggatgcaaacgcaacacaggaaactgtagataaacagacagaagctgtagaagcagcaataaaagcacttgtaaaaatcaaagtatcggctgaaacagataaacttaaagaagctgtaaaagaagctgaggaacttgtaaaagacacagagaaatattccgaagaatcccggaatgctcttacagatgcaattgcattagcacaggaggtacttgaggatacaaacgcaacacaggaaactgtggataaagcgctggaagctgtaaatgcagcaaaagaagctctggtagaggtaggaaatctgagaaatgttgttgatgaagcagcaaaactgacaggcgaaaccaataagtacaccgaagattctgtgaaagctctccaggcagccattgacgaagccaagaaagtacttggtaatccgaaagcaactaaggatgaagtggctactgctttaaatgctgtaaacaaggcaaaagaagaactgaaagtaaaagaagcagataagaaagacgaagaacctaaaaaagaagaacctaagaaagatccaaccaacgagaacatcaacaacggttccacaaatgggggcactaacaatggaacttccaacacaggttccggaaacaatggaagcaccactacaccatccggaacaaaaactgtaagcggaaacaataactccgtaaaagcagccaaaaccggagatacaaccaatgtagtcggactggtagttctttgcctggcagccggagttgttatggttatggtgaagaaaaaaagagctcactaattaggattagaaagcctgtagctgccaggatactacgcagttacgataatttcttaagcaggcgttaacagatcgtctcggatgcggaactcagatgcgcatccgaacggtcttggattagttggcaaatagaaaagagatggagtaaacatgtttgcatttataattattttaacaaccatgatatttttggcttgtgcttttggagctttctgtttgtgcaaagaatccattaactggagaagcgaatagatggggtatgatctggaagagagtctgaaaagccaaaagaaaaagaatgcaggtatgccggaaatggaatatacaggcagcaaggcataaaaataacgccatcggatatccggtggcgttatttttatgcaattaacagaacctgcgaaatcatactttagaatatcaaaatgccattatcgaagggaatattattgacttcgataatggcattgaatcgttaactaaattgccttcctgtactgggatggtgcctcattgatgatattcataaacaccttcgagtaatgctgggagtctgtaaaacctacctgcagagcaatctccgtcagcgtcagactggtagtctgcataagctggatggagcggttgatgcggtaaatattaatatagtttgataatgtcactcccatatagcttttgaaaagcttactcagatagcggacagagatctgtaattgctgagcgatatcttcctgtaagatcttggtattatagtgttcatgaatataattcagtgcataagctacgtaactgttcttcagcttgggatcagcgtattcctgtaccggattcgtatgatcgagaatatagagcatcagattcatcatggaaacattaagattggcagctgtaaacatactttcataagaagcatgcaagtcaataagcttctgaagatgatcgtcaatcacagcatccgatctgagcctgtagtaaaaatgcgaagaaaacagtatggcatgaagaagggtaatcgggaaaatcccgtcatcttcaagcacaacagtggaaaacatattcggattaaaatgaatatgctggaattcgcagtctgaggtatcattcaaataaaaggaatgtaccacatccggcaggatcataataaaatcaccttccgtgcaatgaagggtctccgattgaatatccatataacattctccggaaagtatccgatagatttcaatgttcgtatgcatatgtcgaataaagttataacctgcttttcgatattcgacaatcgctccggttagaatcgaatccgatagtgtgatctgggcggagacttcagttttccgtcgtgcggaagaagaatcggatgaaaccgaatgtgtagctggtgtgtttataacgttttttttattcattatctgcaagcctccaagtgtaagtaaagtcaatttctcactataaattattataacagaaaaaagtaaaaatgcatagaataatagaaaaaaatatgtttaattttgggcggatttgtaaaataattgagcttccaaaaagtaaaaaattgcataatatggaagttcacactgataaagcaagaaagcactggtgaatatgacgaaacggatatacacaggttaatcttcgctggtgatattccgcaagacgctttttgtgagcgaagatcaaagaaaagctgagacatatcgctagagcttgtctgaaaaatcatttccgcaatctgcaagccccactttgcggtatattttaccctcattcggttgccgtagcccgctacgccgccctcattcggataaaatctcccacaaactgggactcgcagctcacgaaaagcctttttcaaacacgctctagagagtgttactgagaaggtcgagaacagtaatgcatctgggtaaaaatctggtaaggaaagaactgtgaagaggaagaaactgaacaattacatgaaaaagataaaaaatttctcgacatcagagaaaaatatgagaaaatatgtacaataagaaaatcaagaattgacaatgaaacggaataaagtttatactatcgaaagttagaaaggactaataagaggttaataaatgaaattaaaaaaagtattgctggtctgtctgattcctgcatttgtcatcagcggatgtgggaaaacaacgaaagatgagacagaaaatataacgaaacaggaaatcactgcagaagaatctgcgcaggatgagcaggagacgggaaacacagaaacggaagcatccggcaaagatccgaacgagaaaacagaagaagcgtccagggatctctttgccatggatacctatatgacactgactgcatatggggagcatgctcaggaggcagttgacaaggcggcagagagagtggaagctctggatgcccttctttccaccggagatgagaacagtgagatctatcagctgaatcagaaaggagaggcaacactttctgaagatggcggatatctggtggaacgggcgctggagttgtatgacaagacagaaggagcctttgatattgcgatttacccggtgatgcaggcatggggatttccgacacaggagtatcatgtgccggatgatgcgacactgaaagaaaagctgatccttgccgatgcgtccaaagtgaattacgacaaagacacaagaaaaatctcttttgaccgggatggcatggagatcgatctgggtgggatcgcaaagggatatacctctgctcagatcatgcagatctatcaggactgcggtgtgacaagcgggctggtaaacctcggtggaaacgtacaggcactgggatgtaaaacagatggcagcaaatggaaagtagcgatccagagtccggatgatacggaagattatctcggtattctggagattgaaaatcaggcggtgatcacatccggtggttatgaacgttattttgaggaagatggcgtgacatatcatcatattattgatccggctaccggatatccggcagacaatgggctgatctctgtaacgatcgtcagcgatgacggaactctggcagatgggctttccacttctttatttatcatgggagaagagaaagcggcacagttctggaaggaaaacagtgagaaatttgagacgatcatggaaactgcagatggaaagctgtatgtgacagaaggaatcggcgacagtctgactacggatatggatgtgacagtgattcataaataaaagttatgcgaaaatccctaaacatacaagtacaaatgtgatcacagaagacgtttagatgcattttggctcgccaccgggaagccgctgaacagttacaaagtcagtacataaaaatactcgaaaacaaaggagagaaagcagatggacatcagagaaatgctggaaaaatgcaaaccctttgccccggttgtttccgctgcggttgtggcagcatgtgtggcaggatctttatatggatataaagtaccggtttacgagacgaaagcgtctgtggaggatacacaggagcaggaggatgaagtaccggtggtaaagaccagcacggaagaagaaacaaaagaggatgaagcggcagaagaagaggaacaggcaaagggttcctttgatctggaagatggtgtgtatcaggggagtggaaccggatatcggggaaatatcacggtagcggttacgatcaaagacaaacagatcacatccatcgagattttgagtgcttctgatgatgaaccgtttttcggacgggcgaaaggtctgatcgatcagattattaaaaagcagagtacaaaggtagatacggtatccggtgcgacctatagttccaaaggaatcatcagtgcggtgaaaaatgcactgaccggagaaaaagacagtggtacgacgggttcttcacaggagggaacttccgcaagtcagagccagtcaacaccggaagcagcaggaagcgtacaggaaccggcagcttataaagatggaacctattatggaaccggaacaggatttgccggaaatctgaaggtagaagttgtgatcaacggtggaaagatcagtaatattcagatcgtggagaccaatgatggaagtgaatatatccagaaggcttccggggtgatcaatcggatcctgggtgcacagagtactaatggtattgatacggtatccggtgcaaccttcagttccaacggaatcattaaggcggtgcggaatgcactgagccaggcagcagtgacagagactgcatctgcggaaaaaggaggcaactccggttctgacggaacagacacggaaaataaagaaaatacagaaaatagtacaacagcggttacaggaacactcccgtataacgagggcgtttactacggaaccgcagaaggatataacggcgatattacggtcgccatcgtgatccgggaaaagacactgaaggcagttctggttatcggagaagaggatgacgatgctttcttcggccgtgccatggatgtggtcacacagatgatgaaaaaacagagtacagaggtagataccgtatccggtgctacttatagttctaagggactgatccaggcggtgaagaatgcgctggaagaagcaaaacgtgtcaccaacggagagacagacaccgatggtgataacaatgtagtacagctgaatacagaggaagtagaaaaagcaatcgatgcggtcaacgaactgaacggcagtgactatacttctgcaagctgggcagttgtaaaggttcgtctgaaggatgccagaaaggtactgaaaaacgcgacagaacagacgcagcttgatgaggcggcagtgcagttaaatcaggcagtcacagaattgcagatttcggatggaacaaatgacgatccggaaccggatcttccaccggaaagtacttacatagatggtgtatatccggtaactgtactttgtctgccggatgcagatatggattttgaagcatataatctgtttgcacgggtgacgattcaagatgataagattataaaaattgataatgtgtatggagacggaggatccggtaacgacagctacattaataaagcggtcaacggaacatcaagcaagacgggtgtggtaaaacagattacggaaaaaggtaatctggatggcatcgatacggtatccagagcgacctgtacatcccaggcaattatcgatgcatgccagcaggcattaaataacgcaaagaggcagtaagaaacaagaaagaaaagagaatagacaatgggagaatttttgaccagagcgatcagtgtggtggctgtcgttgtctgcctgaacggatataacacggtactcgacaaaagagaacaggcagaagaacagctcagaaagcagcaggcggaactggaacaggaacagtcagtcgatgcagcaaaggaaggcacaaccacagacggtgcttacaaagacggaacttataccggagaagcacagggatttggcggatcgatagatgtggcagtgatcattgaaaacggaaaaatttctgaaatcaatatcacatcggcagaaaaagaagatggtgcatatctttctatggcagaggatattattccgtcaatccttgaagcacagagtgcagaggtagataccatcagcggcgcaaccttcagttccaccggtatcaaagaagcggtggcacaggcactggaagaagcagcaaaccaggaggattaagacagcaattatggatatacataatctaacagcgaaagaaagaaaaaaaatacatacctggctgcgggcattgattcagcttctttattttatatttattccatctgtctataccgcagcatttgcgggggtaaaatacatttttacccagataggagcaggtgagaaggttgctatgacatcgtttgtgacggtgcttctggtgatttgtctctacactatggtatttggcagattcttctgtggatttgtctgcgcgtttggcgcgtttggagacgcactgcatgcgctgtatacaaaagtatgcaaaaaacggaaaaagaaaccggtgaagattccggaaaaggcagtctggattttaggttatatgaaatatttggtactgttgctgattgtccttttgtgttattctggaatatatggaaaagcacagggaaccagcccgtgggatgtattttccatgattcacgcaggaaacttccggctgggaggctatgggatcggccttgtgatcctgctccttctgatggctggcatgtgtgtacaggaaaggtttttctgccagttcttctgccccatgggagcagtattttccctgcttccggtactgccgtttttctcccttcacagaacgagagaaaactgcagaaaaggatgtaaagcatgtacgaagacctgcccgtctcagatcggccttccgtcggatggtgactgggctgtcagcggtgattgctaccagtgtcagaagtgtatcgatatctgtccacagaagcacattcactgtggaatccggaagctcaaaggaaatgagttctggttcacgattctgcgtgcactgatcctgcttgggatctgtctgtggctgggactgtaagatctgcgcttttcaaaaatgacagataaggagcagatatgaaaaaaagagatatcctgctggcaggagggatcgtgctggtggctctggtaatgcttctggtgatgcatgtaaccggagagacgaagggggatcaggtacagattaccgtgaacggggaaatctatggaacttatccgctggagaaagatcagacgatcgaagttactgaaggagaatttcacaatgtgatccgcatcgaggacggacaggcatatatggaagaagcggactgcccggacggctactgcaaggagcagggcaggatcagcggccagaaacagaccatcgtatgtctgccccataaactggtggtggaagtgatccgtcagaatgatacggacaggaaggcggctgatgacgagctggtgccggatacgattgcgaagtgaaagaaagatgagaaatcgtaatgattcagaaggtgactgtgaagtcgtggaagagttacgagcaacatactccgaaaggaaacgagaagatgaaaaaacaggaacagcagaaaaatggatgcagggaacgcagtctggccagcatcagccggagagtatcgagcggtgcgatgcttgtggcattggcgatgatcttcagttatgtggaaagcctgattcccatcaacctgggaataccgggaattaaattaggagttgccaatctggtgacggtcaccgggctgtatatcctggcaccgatggaagtgctgttggtagtgatactccgggtgcttctggtgggatttatgttcggaaacggcatgtcgatcctgtacagtctggcagggggcattttaagttttctggtgatgctgctgttgaagcggatcaaaggattttccatgatcggcataagcattgccggaggcgtgtcccataacatcggacagatcgtggttgcgatgtgtgtgctggaaaatacgaagctgatctattacctgccggtgctgatgatcgcgggaacggtcacaggtattctgatcggcgtggtgagccgtaaaatcctcccggcagtcagccagggcgcgggagcggaaagaaagaacaaataaatgtaactattcggtagctaccgggaaggtgctgaacagttacaaataaacgaaaaggaatgtatctgacaggtacttctctcttgataaaagccatgagagagaggcagctgtcaggtacattcctgagaaaagagataacgtctattttttttgattataggttagtcacaactaatgataaatattatcaactaatagtagaaatagtgactaacttgataataaggtaactgttcagtacctccccattggctactgaatagttacataataagctactataaaattttatggtaaaagaaggaggagtttatgaacaacaaaagagtcaggaccaaagcaatggccatggcggtagccgcagcaatggcagtggaactttgcccggtaacagcatttgcagtgaccggggatcaggtggcagcagatggaacgtacagtaaaacagcacatgtatccagaacgtcggaagatgatgagaatgaggatatctggagcgaatataatgtgaaagtcagcattacatctgcagaagggattattacagaagctgccgtagaagcagatggagatatagaagctgggaacaggaaatatgtaaaaaaactgaatactgaaattcagaatctgaagggaaaaccagctacggaagcatccgtgaatgaaatcaatgcagtaagtggtgcaacccgtacctctgctgcagtaaaacaggcagctcttgaagctatgcagtcagcatctgaaaaacaggatccgactccggttgaagtaaacactgctgctctccaggcttcgatcacaacagcagaaggaaagaatcaggcagattacacagaagcatcctgggcaactctgaccgagaaacttaccgcagcaaaagcagctctggaagcaaaagaatcccaggaagcagttgacgcagctaagacagcattggatgaagcagttgaagctctggcaaaaaaaccgtcagaaccggagacaccggacgttacaaccggaacgtacgtcctgatgaacattccgtatgatcagttctatgcagcagacgtaaataacagtgtaaaagtagatgcatttacctctgcaacgaaaaataaagttcgtacagccggtctggcaggcggttcttatcacgttgataataccggtaatgaaatcacaggtgtgactttccctgtaaaagtcggcgaaggtgttgatctgagtaagtataaaaaaataacagacgaatcttctgtagatattacggttacaaacagaggtcagacaagtacagccacatacacaggaaaagatgctctgtttgaaagtgcaagctattcctactatacactaagagaaacaccgaaatattacaaagaagtaaccttgaatgctgacggaagtctttctttcggaaaaacacagggaacagcacagaaagtatccggagtaacaccggaacttactacacaaacctcttatggtgattatcagctgaatctggatggactggagaataccattttccagagtggtacacaggtttacggcgtcattataagtacaaaagaaggaaacgattacggtatgcgtcatctggagaatatctggagagtgacagaacttgcatggtgtaccggatttacttcagcagtacataattgtcccacatcttctgcacattatgtaaatatgatgggtcagcatatcaataaggtgacatattatacttctcagggaatttatgagatcccggtagataacctgtatgtaccgaaaaaagcaggtcagacggtaaaggtagcagatgcgaaagtatctgcaggggaggcagaaattacagtgtctaatcttccgacagatttttcgccggaatacaagattgatagactggatttcagtgtggaaaacggaaaaatcgtatttaaaaatgcaaaaaaagggaaatatacgctgacagtgtctgacaaaaacaacaattatgcggagatgacaacaacctttatcctgtctgctgacagcgcaccggcatcttacaataacgataatgagaatccggctataacaaaaaatgcagatgcaagcgacgaagaatttgcagattatatcaaaaacattacctctgtatctgtcaatggaaaatcgtatgcggcaagcggacgtggagctgtgaaagtgatcaacgaagacggatctctgaaaacagatgcaacaccatttgctgagggtgatacttttgaaatcgcagttacttccaccggttatccggaagtgaaatttacgtatacaaagaatgcacaggaagaatacaaatatgtctatgcggcgatgacctgggcagagtactgggccgcagaagaggtacaggcagccggagattccagctcttccagtgaactggatacaagaaacgaagcagacaaaggagcgttcgatgccgtaacaagagcaacagcaaaccatggactgcacagaggaagtttccagtgtgtagcggtcattgaagcagaaaacggaaaaacttatgaagtatcccactggtcatcagatggaaaagaaattaccctgacgaatgggaatgtgatcaaatttaatagaggagaaatcacagatacagacggaactattacaaagctgaaagactatgaagtaacaggactgaagtatgtgccggtgaaagtggcaagtgcagactatgaagcattctgccagaaatacaacgtagtggaaaacggcggggaactggtcggaggatacggagaaaacaaactggcggcctacagcgtaaaggcaaacgtgacagaagccaccaacggactgaagacagttaccaaagacgaaaaaggaaatttcagtttttccgcccgtcaggcaggaagcgattccggtatcgaaggacagacactgaagactgctccggatgcaacggaagcaggtttaacagtgaaagatgccaaaggctcttacggagaattccttcgggtggatctgacaggtaactatggagatcttggagccaatatgcaggcggtaacctggacgtactatggcaatgacagcacttacagcaatgtgaaggctacctatggaacaaaattcgcagcagacaactggatgcataaaacaaagggaattcagctggctctgaccaaatccctgagatgcacattgccggaaggaaccgatggaaccggctactggacgatcacgattgcagcgctgggttataaagatgtaacctatcagttccaggcaacggatgcaaatatcgtaaaagacagtgaagaagaaataagcactgacgaattaaagaaagcgatcgaagctgcagaagccctgaccgagagcgattacaccgcagacagctgggcagcgatgcaggcagaactgcaggaagcaaaagatgagctgaaagacccgaagactcaggcaacagtagatgaagcaacgcatcatctgaacgcagcgatcgaagccctggtaaaagcacagaaagaaacatatgttctgatgaacatcccatacgatcagttctacaaagcagatgtaaataacgatgttaaagtagatgcatttacctctgcaaccaagaacaaagtaagaaccggttctctggcaggcggatcttaccatgtggatgcaagcggtgatgagatcaccggtgtaactttcccggtaaaagttccggcaggtacggatctgagtaaatacacacagattaccgatgattccaaagtaagtatcacagttaccaacagaggacaggaaagcacaacagattatacaggaaaagatgccctgtttgagagcgcaagctattcctattatacactgagtgagaaaccatcttactacaaagagctgacagtaaatgaagatggaacattctctttcggagcaacacagggaaccgctacaactatcactgaaggtgtgacagcggaactgatgaccgagtccaaatatggtgactatcagctggatctggatggactgaccgataccattccgtcaggaacagctatctacggtgttattgtaagcacaaaagaaggcagcgattacggtatgcgtcatctggaaaatatctggagagtttccgaactggcatgggctaccggatttaccacagcagtacataactgcccgacatcatctgaacattacaaagcaatgatgggacagcatatcgataaagtgacttattacacagctaacggtatctatgagatcccggtaggcggcgaaaaaggtctgtatgtacctgtaaaatttgataccagcgcagttgccgtagcagatgcggaactgaaagacggagaaacaagtgtggcaactactatttccggtctgactcttccggaaggatttgacgcagagtacacggtagagggtgctactgccagcgtaaaaggcgaaaaactgatcctgaaagatgtgaaaaaaggagcatacacactgactattactgataagagtggaaaatatgcaccgatcagttttagatttgaagtatatgcggaaacaatgccggcagcatataacgaaaacagtgaaaaacctggtctggcaaaagcagcaggcgctactgacgcagaatttgcagattacatcaagaatattacctccgtatctgttaatggaaaaccttatgcagtaagcggacgtaatgcagtaaaactgtttaatgatgacggaactctgatcacagatgcagcaccatttgcagagggtgacagctttgaaatcgtagtaacagcaaccggatacaaagatttgagctttgtttataagaaagctgcaaaagaagatccggcgaaggaaatcaacatagcttctctggaaaaagcaatccagagtgcagaagcactgaaagaagcagattacacagcagacagctggaaagttctgcaggtagcactgaagaatgcaaagagtgcactggaagctaagaaagaccagacaagtgtagataatgcagcagcttctctgaacaaagctattgaagctctggtgaaagcggacggaaccacaccgacaccaaccccgaccaccacaccaacggcaacacctgcagcatctaagaacaacataaccacttctggtacaggcaataaaacaacaacttcttcaggaagcacaagcactagcaagacagccaagaccggcgaccctaccaacatccttgagatgcttggactggctgttgcctctctgggaactggcggatttgcgctgaagagaagaaaaagaaataaaaagtaatagataacgggacgtaaggaccggaggaagagacgggtattgcacatgagtttatgtgcagtacctgttttttctttcaaagagggacgaaacggattccggaggcatggggaaagcaaccgctggtaacgcaaatccgaactaagcattaactgcgactaagacgctcagcaaaggcttcgcgcctaagtctccgtaaatgctggatttcgtatttgctaaaagcaccagcaaaaggctgcttcccccatgcctccggaatccgtttctggtggttggcagaaacattaaaatgaaaagatgtaactattcagtagccactgtcccgcgaggtgttttgacatgaatatgtcaaaatcccgagacgtacaagccaaaatgccatcaccgaaggtgattttttatgtattttggctcgtaactgtgaaggtactgaacagttacgaaaagataaaggtttttagagggataaaatcttgcaaagtatagaagtctctgttacaatgatagaaatttatagtatccgtaagcattttctgacggataaaaatatctaattagcatatcggaatcacatatctaatactcagagtcctgagaaaatatccgatgcatacacaaaaatgaatatagaacagaatatggacattttctttaggaattttgaagcaaagttatgtcgtcagtaaaatgcgttctctttgatgggagagtaaagtgtggtactatagaaagaaagtctccgtattttttgttctgtaagaaggaaaaggagacatgatgaacgaacagaaaaaaacaatgacacaggaaacgcaaaacagagaagattttattatgcttccaaccgtagatttctgctttaaggaactgatgcagaatgcaaaggtacggcagggaatgatcgcagcactattgggagtagagccggaagagatcgaagaaactattttactgccgacaatcttacatccagaatatccggatgataaatatggaattctggatgtaaaagttgttttgaaaaatgggtcgcagatggattttgagatgcaggtgacagcagtttcttactggacgaagagaatactgttttatctggggaaaatgtatacggatcagctgaaagcaggagaaagttatgagaagctgaagaaatgtatccatgtaggtattttaaactttattcatttcccggatgatgacagatgctatcggaagattattttctgtgataaagacacgggagaagaatatacagatctgctggagatccatgtgctggaactgaaaaaattgccggaaaaagaacagaatgaatccggaattatccgatggatgcgtttcctgggagcgaagagcagaaaggagttcgagaaaatggcaaaagaagacacttatatagacgaagcgtatgaaatgttaaaacatatgagcgcggatgaaaaaaagagattagaatacgaagcgagggagaaagcaattcgcgactataactcacagatgctggaattaaaagaagtgggaagaaaagaaggaattgctattggagcagagcaaggtgaacaacgaaaagcagcaagtattataacaaatatgttacgaaagggaaaaggtccggaagaaattgcagatatgacaggtgagaatttggaagaaatacaggcgattcagaagcggttgttataagggaatcattgtttccagttatataaaagaaaaaattgaaaaaagttgcaacatttttgcaggctgaactgtatagaaagtgaaaacgaaaacaaaaagagacaggagcgggaaataacgatgggttatcagaccagagcgttgccgggtagcggaacgtggatgatggagagtgggatcaggaacaggatcactgaatggtatctgttcgtggaaaagaagaaaatacagatccttcagaaattctccatgtttcgaaaagaagcggatcttgggaaaacggtaaaaattgtcgggaaacagaagatggcggtgctggcagaaagaatcatggatacttatgggaatgcagtgctgcggcttgcctatacgtatgtacataatatgagtgatgcagaggatatcctgcaggaaactctgatccgttatctggaacaccgtccggtatttgccggtgaaaatcatgaaaaggcgtggatcttccgggtggcggcgaatctgagtaaaaataagatcgcttacaataagatccgtcaggcagaccagctggaagatcagctgatcgcgcaggaacgggaagatctgacttttgtgtgggatgcggtaaagagacttcctgaaagttaccgggaagcgattcatctgtattattatgaaggatttccaacggcacagattgcagagatcctagggaaaaaggagagcagcgtgcggtctgaccttcggagaggaagagagaaactgcgggaagtcctgagagaggagtatgattttgagtaagcgatatcatgaaatcatggaaaatatccaactgacaacggaaacaagagaacagatcctgcgccatgtctcggaaagagaacaaaaggcaaaggtgcaaaccatgaaaaaatggacaaaatatctgtcggttgcagcgtgttgcgcactggtcgtgggagctgcttatggaattcatacgttacatccggacaaaacagtcagtgaggaagaagatatgactactacggatgtggcagatgacggagcgcagatgccaaatccgatgcaggagtatggttctgcggaggaactttccgatgcggtgggatttaccgttaaagagatcggagaactgccatttaccgtgaaggaaacccagtattttacctatgatgatacgctggctgagatccgctataccggggatgatcaggaagtgtatttcagaaaatcacagggggatgatgaagataacagcggcgtatacaacacatacagccaggagactacgatcaacgtgggagaggcagaagtcacctgcaagggagacagcgatgcgtatgaactggcgatctggcagcagggaggatattcgtattcgatcagtctgcaaatcggaatcagcctggaagagttgcaggcgatgatagaaacggtggaagattaggcagacagggggacggaagcatgaagaaaagactatatcggtggagattctttctggcagttgttgtggtgatcctggcaggagccggcatctggatctttcaaaagaaatccagaacatttgtaccggcaacagaggttttactgaaaggtccttatggaacactcacattgcagctgccggaggaatggaactatgagattcagacggaagaacaggatactgtgtatggaatcagtttttatcgaggggaagataaagaaaatgaagttctggtgaagtacgaaaaggattatccaggtgaaacatgtgggacagggttggaagaaaagaagatccggctggcaggagaaaaagccctggaagaattgagagacggttttgcatctggcatatgggaggagattgtatttctgggtgaaaaaagcgatatccatatcatcaatccatgtggcgagagtgcatggtggaaagaaaatgaaaaacaggttatgcagatcctgaacacactgcaatatgatccggagacaaccgcagatgaatgccaggtggaggttcagcagcagatagaagaaggttttttgccggaagattctgttactgggatcaccatatctacccgaccgggagaaacgaggtatgagctgtccgatgtagagaaaatcaaaacagtcacaaactatctgaaccatctgaaaatggaaaagaacagttccgtggatccggaagattatgatggaatgatatcggatatccaggtgaactatgctgacggaaaagaatgtatggttcagcatatggcaaatcagtttgtccggaaagacggcggtccgtggtatcaactggagaaagaagaaggactccgctgggattcggttctggaagaagtaagcggataatgcgagagccggttttgagacaggcattttggttcgtaattatgaagggattgaaattgtcataaatgaaagaaaaaagcggatgtatctgccggtctgacagatacatccgcttttggtatctatagttatgattatttcagatttgctctctttctcagtctggaatccagaatcttcttacggatacgcaggctggtaggagtgatctccaggagctcatcgttatcgatgaattccaatgcctgttccaggctcaggactttcggcggggtcagtttcagggcatcatctgcggaggaagaacgggtgttggttagatgtttggtcttgcagacattcagctcgatatcttcggctttaccgttctgtccgataaccataccggcgtaaactctttcgccaggtccgataaacagtgtaccacgctcctgtgcagcgaacagaccgtaagttacggactcgccggcttcaaaagcgatcagggaaccctgttttctgtactggatatctcctttgtacggagcgtagtcgtcaaaacttgtgttcaggataccggtacctttggtggaagtcatgaagtctccacggaaaccgatcagaccacgggccggaatctcgaattccagacgggtggaaccgtcgcttccggtgctcataccctgcagggaacctttacgttcgctcattttctggatgactgtaccggagaactcttccggaacatcgatgtaagccaattccataggctctaacagttttccgcgttcgtcctctttataaagaacttccgctttacttactgcaaattcataaccctcacggcgcatattctcgatcaggacagacagatgcagttctccacgaccggataccttgaaacagtccggagaatcggtatcttccacgcgcaggctgacatcggtgttcagctcacgcatcagacgttctcttaagtgacgggaagttacaaatttaccttcctgacctgccagcgggctgtcatttaccataaaatgcatggcgatggtcggctcggagatcttctggaacgggatcggttccggattttccacgtcacacagggtatcaccgatgtgaatctccgggataccggaaatagcaacgatagaaccgatgcctgcttcctgtacttctattttattcagaccttcaaattcatacagtttactgatctttacttttttcttcttggaaggatcgtgatggttcatcagcatcacttcctggttgacagcgatcttaccgttgtctactttaccgacaccgatacgacctacatattcattgtagtcgatggtactgatcagaacctgtgtacctgcatccggatcaccttccggagccgggatgtattttaagatggtctcaaacagaggttccatattttccggtgtatcgttcagatccagaacagcgtggcctgcttttgcggaagcatacaggaacggacagtctaactgttcgtcggaagcatccagatccatcagaagttccagaacttcgtcaataacttcatccggacgggcttccggacggtcgatcttattgatacatacgatcacgtgcagatccagttccagcgcttttttcagaacaaatttggtctgcggcatagcaccctcgaacgcatctaccaccaggataacaccgtctaccatcttcaggacacgttctacctcgccgccgaagtccgcatggcctggggtgtcgatgatgttgattttggtatctttgtaataaacagctgtatttttggaaagaatcgtgataccacgttcccgctcgatatcgttggagtccatgacacgttcctggacttcctgattcgcacggaatacaccgctctgacgcagtaactggtctaccagagtggttttaccatggtctacatgggcgatgatcgccacgttacgaatatcttctcttttgattttcataaacaatttcctttctatgcatataaagagcccgtaaaacgggcatttccaacgatacaagtctatcacatttttttcagattacaagggaaaaaaatttttttttcaaaatccggttctaaataaggaaggaacggaatagaaataaattatacaaaatacaaaaaagaggaaggggaactacaatcatgacagataagattattgaaaacaatcaggtggaaatcatgggaaaaatcgcatcccggtttacattcagccatcaggtattcggcgaaggcttttatatggtagatgtgctggtcaaacggcttagcgattccgaggaccggatcccggtcatgatctcggagcgtcttgtggatgtgaatgaggattatgaaggggagtatatccatgtgatggggcagtttcgctcctacaaccgccatgaggaaaagaaaaaccggctggtgctctcggtgtttgccagagaggtggaatttgtggaagatgacgatgaaaatatgaagagcaatgccattttcctggacggatacatatgcaaaccgccggtgtaccggaaaaccccacttggcagagaaatcgcagatcttctgatcgccgtcaaccggccgtatggaaaatcggactacattccgtgcatctgctggggcagaaatgccagatatgcatctgcttttcaggtgggtggtcacgtcctgatctggggcaggatccagagccgggaatacgtgaaaaaaatcagtgaagaagagacgcagaagcggatcgcatacgagatttctgtaagcaaactggaatatgcggattgacaataaaaatgaataatgatatgattgaaaaaataaaatgtttatttaaaatgttttttataaatttaggtagaggttgcattttttatcagtaatttgtcggatgtttcaggaacagaagaaggcaaaggaaaggaaaaagtgccgaaggggcgaagaaacctgaagcttggttcttgggcatgtctgtgaagaacggcatgactgtcatcgaaagatggagtgctatccaaagaaaacatgtgatgatttcatagcggattcttaaaaggtggacctccggacggtggtgcacctttatatgttttacattacatatcaataattggtccgatggatcgataattgatccagacaaaagaaaggagtaaagatagatatggctatttttgaaggagcaggtgttgcgcttgttacacctatgaacgaaaatctggaagtaaactatgacaagctggaagaattactggaggaacagatcgcaggaggcacagatgccattgtgatctgcggaacaacaggcgaatctgcgacactcaccgaagaagaacatatgagaacgatcagatttgccattgacaaggtaaaccaccgaatcccggttgttgcaggtaccggctccaattccaccgcaaccgcaacacagatgtccaaagaggcagcagaagcaggagcagatggtattcttctggtaactccttactataataaaggaacacagaacggactgatcaaacattatacaaccatcacagaggaagcaaaagtaccggcgatcctgtacaacgtaccgagccgtaccggctgttctctggcagcttccacggttgcttatcttgcaaaaaatgcagaatatgtaaccgctatcaaagaagcatccggagatatcagccatgtggcagatatcatgtatgcctgcgacggagccattgatctgtattccggaaatgatgaccagatcgtaccgatcctgtccctgggcggaaaaggtgttatctctgtactgtccaatgtagcaccgaaagagacgcacgatatcgttgctctgttcctggaaggaaaaataaaagaaagccgtgaactgcagttaaaagcgttgccgctggttcacgcactgttcagtgaagttaacccgatcccggtaaaggcagccctgaatctgatgggtaaagaagtaggaccgcttcgtctgccactgaccgaaatggaagcagcacaccaggaagttctggtagaagaaatgaaaaaattcggtatcaaactggcataaaggcagcaggaagaaacaggagagaacgcaaatggtaaaagtaattatgcatggctgtaacggccatatgggtcaggtgatcacccagttagtggaaaaagatccggaaattgaaattgtagcaggtattgatttaaatgactgcagagataacggatatccggtatttactgatatttggacctgcgatgtgcaggcagatgcagtgatcgatttctgtacagcgaaagcgaccgacacactgctggaatactgtgaaaaaagacagatcccggttgtattatgtactacgggtctgacagatgaacagattaaaaaagtggaagagaccagcaaacatgtggcagtattaaaatcagcaaacatgtccctgggtatcaatctgctgatgaaactggttaaagaagcagcccagacactggcagcggccggatttgacatggagatcgtggaaaaacaccatcgtctgaaagtggacgctccaagcggaactgccctggctctggcagacagcctgaacgagggactggacaacgcttatcattatacttttgacagaagtcagagaagagaacagagagatgacaaagagattggaatctctgctgtccgtggcggaaccatcgtcggagaacatgatgtgatctttgccggtgatgacgaagtgattactttccagcacacagcttactccaagaaactgtttgcaaaaggtgcgattcaggcagccaagttcctgaaaggaaaagaaccgggctggtatcagatgagcgatgtgatcggataagtttaaaatgtaaattgttttgtaactattcagtaggtaatattaactgtgaagatactgaacagttacattgttttaaatattgcaaacagaatacagaaaacagggatacggtcgttttttcaaaaaacggccgtatatttttgcattttccgacacattctacaactgtacaggtgtatgttttgtatgcctgaaaaatgaaggaaagggatgctgtggaaagctacagccacagcagaaaaggagatgcagaatatgaaacatgtatggaagagatatctgatcgtaaccgcaatgaccgttgtactcggactgtcagcaggatgtggcagtgctgtggaggatacgaacaacaatcagaataacacacaggatgaaaatacgccggatggcaatgaaaataaaaacaacaacggaacctcaccggataccaacacggatatgaacaatgacggaaccaacggcacgaacaacaatatgaacggcgccacttccggggaaggtacggtggatgagaacggaaatcgtctggatgaaaatggaaatatcattgaagatctcggagaggatgtcggagagggaattaaagatgtgggggatggcatcggagaaggcgtggaggatctgaccggtggcggaagcagggatgcgaaccaacagaatgcacggtagatcgcagaaatagaaaaaacatggacaattgttggttcaccacagtttgtccggtgagagcaaaaacggaatgcccctcttttttacacctatgttcatgaaaatgtatgttgagagagtatgtcagggtagataatatattactattcattggtaatatcccgcgaggtgttttttgtgagcggaggtcaccgcgcgaatttatgcgatcagcttaaattctgtgcatcgtgaagcgtgttactgagaacggagtgaatagtaacgataacattttaagatgagatgttgagatgacatgttgccgtgtatatggaaacatgatatgataatagaaatttaccacgttacaacgtgacagcatacaaagagaacaggagaagagaggggaagattatgagatttcgtccatgtatcgatattcacaacggaaaagtaaaacagattgtaggcggcagcctgcaggatcagggagatcaggctcaggaaaactatgtagctgagcaggatgctcccttttttgcacggctctatcagtcccgggggattcggggagggcatattattctgttaaatcctgcaacttcgccatattatgaagtcacaagacagcaggcgatagaagcattgaaagcctatccgggtgggatgcagatcggcggcgggatccgggaggacaatgcagagagctttctggatgccggtgccagtcatgtgatcgttacttcttatgtatttaagaatggagtgatcaactgggagaatctggaaaaactggagcgtgcagtaggaagggaacatctggttctggatctgagctgtcggaaaaaagacggacaatattatatcgtgacagaccgctggcagaaatttacacaggtacccgtatcggaacagacgattgaagaattttcttcccactgtgatgaatttctggttcatgcggtggatgtggagggaaaggcttccgggatagaagtggagttggtgaagctcctggcaaagaatcatcagcttccggtgacctatgcaggcggcgtaggcagttttcaggatctggagacgttgcgtatggcgggagaaaatcgtgtggacgtaacagtgggaagcgcactggatcttttcggtggcagtatgaagtgggaggatgttctggatatttgtcagaagagtgaaaattatttcgaaaaataacagattctgaacacttggaaaatcgctcccggatttgacagaaaaagatgtgtaaaaaatatgaattttcacgaaatagttgcaaaattcaagcattattggtataataaaaacacttacaagggagccggaaaggatcgctgaccgtggtatttatcgattctgactccgtaactgtgaaagcagagacagttacttgtaaaataaagtgcgaaggggttggacagcatgaaatttattatcattggaagaaatattgacattacagagggactgaaatcagccgtacaggaaaagcttggcaagctggaacggtattttactccggagacagagattcatgtaaccttgagtgtggaaaaagacagacagaagattgaagttactattccggtaaaaggaaacatcattcgctccgaacaggtgagcagcgatatgtatgtatccattgatctggtggaagaagttattgagcgtcagcttcgcaaatataaaaccaagattgttaatcagcagcaggcaggaggaaacttccagaaagagtttgtggaggatgagttcctggaggacgaagaggttaatatcattcgtaccaagaagtttggtattaaaccgatgtatccggaagatgcatgcgtgcagatggaattgttgggacataatttttatgtgttccggaatgcggagacagatgaggtgaatgtggtttataagagaaaggggaacacttacgggttgattgagccggagtgttaaaattgttgagagcgtaaacgggagagagtcactgggtggtggctctctctcttttttggaggttggtttaagacggacgcccgagagagtttgtgcctgggcaggaggcagcgggcagggcaactttgaactagtacatcgttttcgaaataactgtatcattcacttgtctacgaatccgattgcacagttcaaaaagcctcagcgtagcccgctacgcctacgttttttgaactgcacactcgaatccgtatccagcgtgaataatacagttatttacgaaacgatgtactagccgctaactccgactacagttcacgagggtcggctgaccctcgtgaaagtctccgtaagcgtcggatttcaaagcttaccctaagcgcccgcaaaatgcctcctgcccaggcacaaactctctcgggctgacggtggaaaaaactgacccggaaagggaagaggttggtgactttttggtggatttgtctgaaagtgagatacgggggataatgacggggtgaggatgcacaatttacttgtgcattcttcggtaaagtgttagaatatagcatggtgcattagactggaaagaggccagggtggatgcaccgggaaattttatggagagtgaaaatagtaacaagaaatgtaactgtgaaggtgttgaacagttaccaaaaaataaattgtattttataggagtagattgatgaaattatctgaaaagatctttggaacgcacagttccagagagttgaaaagaattatgccattggtggataagattgaggaattgcggccgactatgcaggcgatgacggacgaggagctgaaggatcagaccagaaagttcaaggagagactggcagagggagagacgctggatgatctgcttccggaggcattcgctacggtgcgtgaggcttccaagcgtgtgctgaatatggagcattaccgggtacagctgatcggtggtattattctgcatcagggacgtatcgctgagatgagaaccggtgaaggtaagacgctggtttctacctgtccggcttatctgaacgcgctggaaggtaaaggcgtgcatatcgtaaccgtcaacgattacctggccaaacgagatgcggagtggatgggtaaagtccatgagtttctgggactgaaagtcggtgtgatcctgaactctatgaaaaatgacgagagacgggaacagtatgcatgtgatattacgtatgttaccaataatgaggatggttttgactatctgcgagacaacatggttatttataaagagcagctggtacaaagagagttgcattatgcgatcatcgatgaggttgactctgtattgatcgatgaggcgagaactcctctgatcatttccggacagagcggaaagtccaccaagctgtatgaagtctgtgatattctggcaagacagctgcagcgtggtgaagccagtggtgagatgaccaagatgacagctatcatgggcgaggaaattatcgagaccggtgattttatcgtcaatgaaaaagataaagtagtaaacctgaccgaggaaggtgtgaagaaagtagagaagttcttccatattgaaaacctggcagatccggagaatctggagatccagcacaatataatccttgcactgcgtgcccataacctgatgttccgtgaccaggattatgtcgtaaaggacgatcaggtactgatcgttgatgaatttaccggacgtatcatgccgggaagaagatattccgacggtctgcatcaggcgattgaggcgaaagagcatgtaaaggtacgccgtgagagcaaaacactggccaccattacattccagaacttctttaacaaatatgcgaaaaaagcaggtatgaccggtacggctctgacagaggaacaggagttccgtgagatctatggtatggacgttatcgagattccgacaaaccgtccggttcagcgtgtcgacctggatgacgcggtatatatgaccaagaaagaaaaattccgtgcggtcgtggaagagatcaaaaaagcacatgcgaagaatcagccggtactggtaggtacgatcacgatcgagacctccgaactgctgagtaatatgcttcggagagagggaatcgcacatcaggtactgaatgcgaaattccatgagctggaagctgagatcgttgcacaggccggtgtggcaggtgcagttaccatcgcgaccaatatggcaggtcgtggtaccgatatcaaactggacgaggaagcgagagcagccggtggtctgaagatcattggtacggagcgtcatgagtcccgccgtatcgataatcagctgcgtggccgttctggtcgtcagggagatccgggagaatcccgtttctatatttcactggaagatgatctgatgcgtctgttcggttctgaaaaactgatgtccgtattcagcagtctcggtgttgcggaaaacgaacagatcgagcataagatgctttccagtgctattgagaaagcacagaggaagattgaaagtaataactacggtatccgtaaaaacctgcttgagtatgaccaggtaaacaacgaacagagagagatcatttataaagagagacgtcgcgtactcgacggagacaatatgcgtgatgcaatctgtaagatgatcaccgataccgtggaaaatacggtagatatgtgtatcagtgacgaggtggattctgatgaatgggatctgatcgaactgaatacgattctgcagccgatcattccggtgaagacaatcaccaaagaggatgtcaaagggatccgtaagaatcagttaaaacagaacctgaaagaagaagctattaaactgtacgaagtaaaagaagctgagtttgcagagccggagcagatccgtgaactggaacgtgtggtacttctgaaggtcattgacagaaaatggatggatcatatcgatgatatggaacagctgcgtcagggtatcggcctgcaggcttacggacagagggatccgaaggttgagtacaagatgagtgcattcgagatgtttgacgagatgatcgcaggcatccagcaggatactgttcgcctgctgtatcatgttagaatcgagcagaaagtagaacgtgagcaggtagcggaagtaaccggaaccaacaaagatgaagaagccaaaggtccggttcgccgtgcccagcagaaagtatacccgaatgatccgtgtccatgcggaagcggtaagaaatacaaacagtgctgtggacgtaagcctgtatagaaggaagcgtgcagaaccgatacggcagagggaaaacggctgctgaatataaaaattgtatgaagaaagagggtgctccctttggtagaattagatcagtttaaagcaatattgaattcctatgcgaaacccttagtggaagtgagggattcccttgacctggtcaataaggaaaagcggattgaagagctggaaagaaagatggaagagccggatttctgggataatccggaacgctcccaggaaatgatgaaagaactcaaaagcctgaaagatgataaggagatttatgaaaatctggaaagtcagagagacgatatggagactctgatcgagatgggatatgaagaagacgatgcttcggtcatcccggagattcaggagattctggatcagtttgagacagattttgaaaatattcgtatgaaaaccctgttatccggagaatacgataaaaaagatgccatcatcaagctgaatgccggagccggcggaaccgagtcctgtgactgggcaggaatgctctaccgtatgtacaccagatgggcggaaaagaaaggatttaccctggaagttctggattatctggacggcgatgaggcaggcatcaaatctgtaacatttgaggtacacggagaaaatgcctatggctacctgaaatcagaaaaaggggtacatcgtctggtacgcatctcaccgtttaatgctgcaggaaagagacagacttcgtttgtatcctgcgatgttatgccggatattgatgaagatctggatgtggatatcaaggaagatgatctgcgtatcgatacgtatcgatccagcggtgccggtggtcagcatatcaacaagacctcttctgccatccgtattacacatattccaaccggaatcgtggtacagtgtcagaatgaacgttctcagtttcagaataaagacaaggctatgcagatgctgaaagcaaaactatatctgttaaaacagcaggaaaatatggaaaaactctccggcatccgtggcgaagtgacagagattggctggggaaatcagattcgttcttatgtactgcagccgtatacgatggtgaaagatcacagaaccggcgtggagagtggtaatgtggacagtattctggatggtaatctggatccgtttatcaacggctatctcaagtggattgcccttggcggaaaacagccggagaacgcaaccgaagaaatggaataacgattctactttccatgactgttgagaaaacggaaagatgggagtacacaaaaaaggagaatggcgtatgggtattatcagagctatcagacagacgattggcggaacactcgctgatcagtggctggaagtcatcgagccggaaaatatgggagatcagacagtactgactgcaggtatccgcaccggaaaaggagcgaaccgaaaaggtggaaaagacagcatttctaacggatcagtgattcatgtatatgagggacagttcatgatgctgttagacggcggacggatcgtggattacagtgcggaaccgggatattttaccgtggataattcttctatgccatccatgttcagtggaagtctggacgatgtggtgaagaattcttttgaccggtttcgttttggcggtacagcacccacttcacagaaagtgctgtatctgaacctgcaggagattaagggaattcgtttcggaaccagaaaccccatcagctattttgataatttttataatgcagaattatttttgagagcccacggaacttattcgatccgaatcacggatccgatcaagttctatgtggaagccattccgaaaaataaagatcaggtagagatcacagatatcaacgaacagtatctgtatgaatttctggatgcactgcagtcttccatcaatcagatgtcagcagatggtatgcgcatctcctatgtgcagtcaaagagccgggaactgtcaaaatatatggcggaaacactggatgaagactggaaacagaccagaggtatggagatccaggcggtagctatcgcgagcctgtcctacgatgacaaatctcaggaacttctgaatatgagaaatcagggagctatgctccaggatccgtccattcgggaaggttatatgcagggagcttttgcaagaggaatggaagccgcaggaagcaatgcaaacggcagtaccatgggcttcatgggaatgcagatgggcggcaatatggcagcttccatgtcagcggccaatcagcagcagatgatccggaaccagcagatgcagcaagaggcagcgacagtacatcgtgcacagaatgagccggatatctggatctgcagctgtggacagcagaataccggaaagttctgcagcgagtgcggacggccccgtcagaccggagaatggatctgcagctgcggacagaagaatacaggaaagttctgcagtgaatgtggaaaatcaagaccataagacttttgcaggaacagatgcagaaaagataaagaaagtatatccgtacagaaagatgaggagaaaatcatggaggtagtcagtttcaaatgccccaattgcgggggcgaactggtatttgatccaaatactcaaaactactcctgtccttattgtaattctgagttttctcaggaacagatcgatacgatgcagaaaggaaaacagccgtctcaggaatctgaggcggctgattctgcaaaaggacaggaacaggaagaagcggtagtgtatgtatgcccgaactgtggagccgagatcgtgacggatccgacaacagcggccacagaatgttattattgtcagagcccggtggtattatcggaaagagtttccggaaagtatctgccccaggagatcattccctttgcgatagaccggaaaaaagcagcggaaatctttttacagaatatgaaaaagaagaaatttgttccccgtggattcttcagcggaaaacagattgaaaagatgagcggggtgtattttccatactggatggtggactggcggggagatgccgcaatggaggcggaagccaccaaagtccgcacctggaggaccggtgatacggaatatacggaaacacagttctaccgggtgtaccgggaaggaaatgtggaatttgacgatatgccgaagatcgccctgcaaaaagccaaccggaagctggtagaaggtgtgcagccgtatgaccggaaggcggcaaaacaattttccatgggttatctctccggttttcaggcagagcgccgggatcttgaaaaagaagcgttcggagcggagatcgcacgggatacggaacaatatgcaaaaagagtgctcgaaaatgatatgcgcggttatacgacggtacgaccggttcatcagcaggtgggcaaccggcaggagcggtggcgttatgcgctggttcctgtgtggacggtgacttataaaggaagaaacggaaagatcttttattacgccatcaacggacaaaacggcaaggtgtgtggagaacttccggttgattataagaaactgagtctggtatcggcattgatcaccggtgtggtatttcttttgggactggcaggaggattgttgttatgagaatgagaaaaaagacgggataccttctgttgatgcttctgctgttgctggttccggtggctgcgtgggcggataaaaccacggtagatgatcaggcaggacttttttcacaggaggaagaacaggaacttaccgatcggatcgtggaacttacgacagactggaacatggattttgtggtagtgacgacagaagatgcggaaggcaagacctccgaggagtatgcggatgattactatgactacaacggatatgcggaggacggtgtcctgtatctgatcgatctggacaacggttcggtgtggatctccacggcgggaaagatgatccggtatctgacagatgcgaggattgatgcggtgatcgatgccggatacgataatctgaaagcaaagaattatgcagatggtattctggagatgctgaatgagacagagcgttatctggaagacggcattccttcggatcagtataattatgatacagagacgggaaagatatcaagataccgcagtattacggtctatgaagcaatcggagcggctgtgatcgcacttttgtgcggtggcggatttgcagcggctgttctgggatcttatcggttaaaaagaaaaacgtatcggtatccgtatgagagccgggcaaaggtgcattttacgagaagggatgatcagttccgccatcgaagcattacacagcggagaatcccgcgggaaccaccgtccggaggtggcggcggacagagttccgtacatacttccggcagtggcacctcacacggtggtggcggtcggagcctgtaatattttatacgattcagacatgctaaagttactgttcactggtaatatcccgcgaggtgttttttgtgagcggaggtcacagaaaacccgagacatatcgcgcgaatttatgcgaacagcataaattctgtgcatcgcgcagcgtgttgctgggcacggagtgaacagtaacatgctaaagatgttttgtttcatttgtgaaaaaattcttgcaccggatgacaatgtatggtaatatcttttgggtgactacaaatgtgtttctgatacgaacatgcagagccacaggaaagaaagagaagacatggaaaaaaagacaaaatattatgtggttagagagaaggcagtgccggaggtactcttaaaagtggttgaagccaagagaattctggattccgagagggcaaccacggtgcaggaggcgaccgaacaggtaggcatcagccgcagctctttttacaaatacaaagacgatatttttccttttcatgatcaggcaaaaggaagaacagttacctttattttgcagatggatgataaaccggggatactttcggatattctgcgcaccgttgctgaatttcgaggaaatatcctgaccattcatcagagtattccaattaacggaatcgcaacgctgacgctgagtgtggagattttgccggaagccggagacgcggaagatatgatcggccagatggaacagcagacaggtgtacattatttgaaaatattaggcagggagtaaaaacagatgatacagattgcagtattaggctacggcacagtgggatccggtgtggtggaagtgatcaaccggaaccaggaaagcattaataaaaaagcaggagaagagatcaacatcaagtatgtacttgacctgagagatttcccgggagatccggtacaggaaaagattgttcatgattacgaagtgatcgccaacgatccggagatcaagatcgtagtggaagtaatgggcggaaccaatccggcgtatacattcgttaagagagcgctggagagcggcaaatccgtatgtacctccaataaagaactggttgcgaaacacggtgtggaactgatccggatcgcaaaggagaaaaactgcaacttcttatttgaagcaagctgcggtggcggtattccgatcatccggccgctgaactgttctctgaccgcagatgaggtcgacgagatcagcggtatcttaaacggaacaacaaactatattttaagcaagatgacaagcgatggttccgagtttgaggatgtgctgaagaatgcacaggaactcggttatgcggagcgcaacccggcagctgatatcgagggctgggatgcctgcagaaagatcgcgattctttcttctctggcatacggtcatcatgtggattttgaggagatctataccgagggaatcacgaagatcacttccgcggatatccgttatgcaaaggcatttggcgcaaccatcaagcttctggccagcagcaagcggatcggggacaagtactatgcgatggtatgcccggttatgatcaacggtgacagcccgctgttcagcgtcaacgatgtatttaatgcgatcgtgatccacggcaatatgctgggggatgcgatgttctacggaagcggcgcaggaaaactgccgacagccagcgcggttgtagctgatgtggtagatgcagccaaacacctgaaccgttttatcatgacgggatggagcagcgagaaactggaaatgatcgatgtcagtcaggtagagagcagattcttcgtccgcatgaaaggcagctacacagagagccttgcaaaagtggaagaagtgttcggaaccatcgatgcgaaggttgtcgcagaggttggtaaagaatttggatttattacctctaagatgaaagaggaagaatacagagcgaaagcggcacagttcgataacattatcggcatgatccgggttcgcttctaagaaaagtgagaaaatgacatgtctgtgcagttctgaaaaaggaccgcgggcatgtctttttttacgcggacaacgagtcaaagatttcagggaaaattcgtgtggaaaaaacatgtgaccgtgcaggaaagaatggataaaaactttgaaaataatcactgtggaagcggttgacgcatggaaaaaaagggtttatcatttagtgcatatccatgtgagagcgcctgaaaacgggggtatcacgaatggaaatacagcagaggcaggaagcggattacgccacagcaggctgatccgcttctgtttgcgtagaaacacaggaggagaaacatgttaatcgtgaaaaagttcggcggcacttcggtggcggacaaagaacgcattttcaatgtggcaaagcgatgcatccgtgattatcagaacggaaacgatgtggtagtggttttatctgccatgggaaaatacacggacgagctgattgccaaagcaaaagaaattaatccaaatccatccaagagagagatggacatgctgtttaccatcggggaacagatgtcggtgtctctgatggccatggcgatggatgcactgggtgtacgtgccatttccctgaatgcattccaggtagccatgcacacgacaagcaattacagcaatgcaagacttaaaaagatcgataccgagcggatccgccgggagcttgatgaccgtaagatcgtgatcgtcacaggtttccagggaatcaacaagtacaacgattacacaacccttggaaggggtggttccgacacgacggcagtagctctggcagcagcgcttcatgcggatgcctgcgagatctatacggacgtagatggtgtctacaccgctgacccgagactggtgccgacagcgagaaagttaaatgcgatcacctatgatgagatgctggatctggcgactctcggagcaggtgtgttacataaccgatcggtggagatggcgaaaaaatacggcgtaccgctggtggtacgttccagtctgaatgaatctgaaggtactgttgtcaaggaggttgtaaagaaaatggaaagaatgttgattagcggcgttgccctggacaaagatgcagaccgtatctccgtaatcggaatcaaggatgcaccgggtagtgcgtttaaattatttaatacactggcaaagaagaatattaatgtggatattatcatccagtctgtgggacgtgagggaacgaaggatatttcctttacggttgcccatgataatctgaaagaggcgattgaactgctcgaagagtatcaggaagtgcttgggtttgagagagtggactataactgtgaggttgcgaaactttcgattgtaggcgccggcatgatgtccaatccgggtgtggctgcaaagatgtttgagtgtctgtataatgagaacgtgaatatcaatatgattgcaacttctgagatccggatcacggtgctggtgaacagtgaggatgcggttcgggcgatgaatgcggtgcatgatgcgtttgggctggctgaggcgtaaaataattagtttgatataagattgctgctaaagcggacgtggcgagccccggagggatccagggtgagacaacgtgggcagggcaactttgaactagccgctaactgcgactaagactctcgcgagagcgctcgagcctaagtctccgtaagcgtcggatttcaaagcttgccctaagcgcccacaaagtgttgtctcaccctggatccctccggggctcgccactggttttgatagaaactagagcgtgtctgaaaaaggcttttcgtgagctgcgagtctcagtttgtgggaaattttatccgaatgagggcggcgtagcgggctacggcaaccgaatgagggtaaaatataccgcaaattggggcttgcagattgcggaattgatttttcagacacgctctaatgtggcaagtcggtaatttgttataagattgggaatatacgataaaaatggcaaatcaggtatattgcataataaaaaagcatatgttataatgccagtaagcaaaaagaaaagacgtgttcataagtagcacagcaaaagccccggagcggcaactccggggctttttgtccgtttgggcgaggtggattagacctcaggctggctaccagcagttagtttctatccagccatttgcaaatataataggcgattatacttgccaagatagaaagaataaaagaaaagacatcatccataagtaacacaccccctttctgcatctgtctgggggtggtagcctattgattatagcataaaagaaatgcgttcacaagttatgcctttattttggagaagagtaatcatatctccccagtgatcttccggtagaagtttgccatcgtaacctgcatataagggatcacccacaaaagtccgatcccacatgcgatcgcacccagcaggtagattccgatgaagctgagctgtagataaaagagttttcccttctttcctctcatgatccgcacactttctttgagtgcctgtatggcttcgatgtcgatgtagtcggtcaggaagaacatggtctggctgaacatcagggagaggatcaggtagatcacgagtcccacgcacaggacggcggtgccggcaaggaggagagttacggacttctggcggtagccgtagatgcaaagtccgctgcccgggaggatgcacaggtaggtcagaagaaggatcacaccctgcgccaggatcgcgcggtccgggtggtgtttgaaaccgtagaagagatcctgaaagcggatgtcgtagcctctggcggtatcaagggcgatctttaacagaccgatattcagtaccgagaggatcagtgagagaataaaggtcgacagataataaaccacggtgtgactgataccaagcgtttccacggtggcggaagtagcagtcagcgggttcaggatggatgaggttccgagtaccagatccattagattcgaagcgaccagtgtgatcaggatatagagcacattggttccgataaacgttccgtattttcccgaaagctggtttcgggccatttttttcagttcttttgatgaaatattcataagtcaaaaacctccataaacaatcacataccgccctggtacatctcataaagctgctgatactgctgaatgagttccgggaaattctgatagacggtgactgcggcgtaaataaagatggcgatgccaaggcaaaggccgatgatggaaaggatacatcccagttttgcctgcggatccatcttatcccctttgcgggagagcagggcgaataaaatgccgagtgcgcctaccgggaaagaaagtccgctgaccagaaagaacagggaaagcgttccggcggtcatggatgcggtactgaatccgttcccacgcttcggcggcagagtcatccgctgttcctcctcctgccaggagccgggatttggctgttgatcgttgtacataatgataatcctcctgttttagaatcggtagtattgtaatataatgaaaaaacaaatttgtttcaatttttcagttatcttccagtataccacagaagttccggagtcgaaagaaggaaaatcagaataaaaatcggcattgacaaagaaacctgccttttggtaaggtagtacaggacacaatgaaagaaaacgtaactgtgaagcaaagacagttacaaaaggagactatacatggatattattcaggcattaacacaggaattacaggtagaaaagtggcagatagaagccgctgtcaaactgatagacgagggaaataccattccttttatttcacgatatagaaaagaagcaaccggttccctgaacgatgagatactgcgtaacctgcatgagagactgctgtatctgagaaacctggaagataagaaaaaacaggtactctcaagcatcgaagaacagggaaaactgacggaagaactgaaaaaatcgattctggaggcacagactctcgtagttgtagaagatctgtaccgcccgtaccgcccgaagcgaagaaccagagcaacgattgccaaagagaaagggctggaacctctggccaatctgatcctgcttcagatgacagacaagtccatcgaagaagaagcggaaagctatgtatctgaagaaaaagaagtaaaaaatgtaaaagaagcgattgcaggagcatcggacattctggcagagtctgttgccgatgaagcagactaccgtatccggatccgtaacatgacagtaaaatcaggttctgtcgtatccagtgccaagaaagaaaacgagaaatctgtatatgaaatgtattatgattttgaggaaccgatttccaaactggcaggacaccgtgtactggcactgaaccgtggagaaaaagaaaagattctgactgtcaagatcaatgcaccggaagaagagatactttcctggttaaaacgtcaggtgatccgcaccgacaatccgaataccaccccgattctggaagcggttgtggaggacagctataaacgtctgatcgcaccggccatcgagcgggagattcgaaatgatctgacagagaaagccgaggacggttcgattaaagtgttcggaaagaacctcgaacagctgctgatgcagcctccaatcgtgggaaaagttgttctcggatgggatccggcattccgcaccggctgtaagctggcagttgttgacgagaccggtaaagtgctcgatacaaccgttgtatatccgactgcaccgaccacagaagccaagatcaaagcagcaaaagaaacagttaaaaaaatgattgaaaagtatcatatcgatctgatctccgtaggaaacggtactgcatccagagaatccgagcaggtgatcgtggatatgttaaaggaagtaccgacaaaggtacagtatgtgatcaccaacgaagcaggagcttccgtatattctgcgagtaaactggcgaccgaagagttcccgaacttcgatgtgggacagagaagtgccgcttccatcgccagacgtctgcaggatccgctggcagaactggtaaagatcgacccgaaagccatcggtgtcggacagtatcagcacgatatgaaccagaagaaactgggcgaggcactgaatggtgtggtagaagactgtgtaaataaagtcggtgtggatctgaataccgcttctgcatctttgttagagtacatttccggtatcagcaaagcgattgcaaaaaatattgtggcctaccgtgaggaaaacggtcgtttcacagaccgaagagaactgttaaaagtagccaaactgggaccgaaagcctttgaacagtgtgccggtttcatgcgtatccagggcggaaagaatccgctggatgcgaccagtgtacatccggaaagctacgaagcagtggaaaaactctttgccaaacagggatttacgaaagaacagtacttcggtgacggaccgactgctatctatatcaaagattataagaaactggcagaagaactgggaatcggcgagatcacccttcatgatattatcaaagaactcggccgtccgggacgtgacccccgtgaagatatgccaaaaccgatcctccgctccgatgtactggatatgaaagatctgaaagaaggcatgatcttaaagggaactgtaagaaatgtcatcgatttcggtgcattcgtagatatcggcgtacaccaggatggtctggtacacatttcccagatcagtgacaaatatatcaaacatccgctggaagttgtcagcgtaggagatgttgtggatgtaaaagtcatcagcgtggatctgaacaaaaaacggatcggtttgtccatgcgtggaattcggtagacgaaggtgataaaatcgcaaaagcgaatataagataagaaaaataaaagatgctaactgtggaagagaatccacagcgggcatcttttttgtttggatttgaatgaatatgattatataatacatacatagaaaagaactgagaaaagcaggaggaaaaaacatgatttatacagtaacgtttaatccgtcactggactacatcgtttccgtcaataactttcagctgggtatgaccaaccggacagccacagagatgatgcttccgggaggaaagggaatcaacgtttctatcgtattgaagaatctgggactggaaaataccgcactgggatttgtggcaggatttaccggagatgagattcaaagacaggtggaagagatcggagtgaacgcaagattcattccggtggacgaggggatttcacggatcaacctgaagctgcagaatattgaaggaacagagatcaacggacagggaccggcgatcagcagggaaaagacacagcagttatttgaaatgctggatcagctgcaggaaggagatgtgctggtgctggcaggaagcattccggcatcgatgccggatgacatttacagaaatatcctgaaacgtctggatggaaaaggaatactgatcgcagtggatgccacggggaatctgctggtgaacgtactggaatatcatccattcctggtaaaaccgaacaatcacgaactgggagaaatcttcggtgcggaattaaaggacagagaatctgtgattccttatgcgaagaagatgcaggagatgggagccaccaacgttctggtatctatggcaggagaaggagcggttctggctgcagctgacggaaaggtctacctggcaccggcaccgaaaggaaaactggtcaatggtgtgggagccggagattctatggtggccggattcctgaccggatggctgaaacgtcaggattaccgtgaggctttccatatgggaattgcaaccggcagcgccagtgcattttccgaatatctggccggtcgtgaacaggtggaagatgtgtacagacaggtaacttcagaagtacggtaacaaaaaggaagtcactagtataacgaatattaaataattgctatattaaattgatactgcttcctcttcactgatttcatccattttatacttccagtgataaaccacgggttcacggttcacttcgtcaaagtacttgtaaattcgttcttccaactcctgtttggtattgacacgaattcctcgaagcatctgtctggtcatcttgctgaagaagctttcaatcatgtttaaccatgagccatgttttggtgtaaacacaaatttaaaacgtccctttggcatagtatccagaaagcgccgtgtttctttggaagtatgtgcagaatgattatccaggatgatccgaatggtatcctgtgatggatattttttgtccagtatctttaaaaactcaataaaatcagaactcttatgggtctcacttactaacggaattgcttctccagtgagtaaatcaatgccagccagtaaagagagcgttcccagacgtttgtattctgcatcacgatatacttccccatgttctgatgtcgggcgtaaatccggtaccgtattggagattgcctgaatgcccggcttctcatcatacgataccgtaatcgtcagtttataatcgtctggaacaatgagatcaccattttcatcaaactgcatttcaatctgcttataaaccaacagaacctcatgcatttttgattcaaaatcaggatcccgtttttcacagtaatatttgattttaaagggtttcatatcctgttccttaagaaatttctggatatacggtttggtaacggttgaaagccttggatatcccgcttcttctgcatgtttctgaatgtatttgtggagagaggtcaacgtccacaattcctgtgcataaccgagttctgtcggtctctgacacgcaatatgaatcatccatgcttttgcatcatcagtgatttccgatggacgtccaggacgctgaacatcaaacagtgcagcatctaaaccgcctttctgaaacttcgaaatacaaaggcgtaccgttgcggtactaatggcaagtttatcagcaatttgctggaatgtcattccatcggctttatataaaaggattctggcacggtccacaacttgtgcctgaatggttctctttttggataatgctttaaggtaatctctgtcttcatctgacagaggaagatatgtttttctcatagtgttcatcctttcttagataacactattttaccatacattatcctcaaaatatatagtagaaatttaatttattctatactagtacatcgtttcgtgaataatacagttatttcgaaaacgatgtactagagcgtgtctgaaaaatcatttccgcaatctgcaagccccactttgcggtatattttaccctcattcggttgccgtagcccgctacgccgccctcattcggataaaatctcccacaaactgggactcgcagctcacgaaaagcttttttgagacacgctctagtcaccgatacagaaagtaagagagagaaaagtatgagggggcacaggatgcaggtatatagtggaaagagtgtatttggcggtatcgccatcggaaagatcagtgtatacaggaaaaatgagcagcagctaaagcgcgtgcggacagaagataccaaaggagaactggcacgttatgaggcagccaaggcagctgccatagaacagcttcaggaactgtatcagaaagcgttaaaagaagtgggcgaggcaaatgcggcgatctttgagattcaccagatgatgctggatgacggggattataacgaatctgtggaaaatatcatcgagacacagaagatcaacgcggagtatgcagtagctgtgaccggcgataattttgcacagatgttccgggcgatggatgacgattatatgagagaacgtgcagcggatgtgaaagatgtctccgaacgagtgctttcgatattaaatggcggacagaagggaaaggtggtcacggatgaaccggtgatcattgttgcggatgatctggctccgtcagagacagtacagctggaaaaagatatggtgctatcttttgtcacggttcacggttcggtgaactcccataccgcgatccttgcaagaaccatggcgatcccggcactgatcggaacggaagaactgccgcttgacgacacggttgacggaaaactggcggtggtagacggactgaatggaaagatctatgtggagccggatgcacagacactggaagagatgaagaaacgccggcaggcagagctggagaaaaaagaactgctgcagcttttaaaaggaaaagataatgttacgctggacggaaagaagatcatgctgtatgctaatataggaaatattaaagatcttgcaactgtaatacagaatgatgccggcggaatcgggctgttccggagtgagtttatttatctggaaaaagatcggtatccgaccgaggaagaacagttcagtatctataagacggcagtggagacgatggcaggaaaacgggtgatcatccgtacactggatatcggggcagacaagcagtgtgagtatttcaagatggataaagaggagaatccggcgctggggtatcgtgcgatccggatctgcctgacccgtccggaaatcttcaaaacacagcttcgtgcgctgttccgtgcgagtgcctacggcaatctggcaatcatgtatccgatgatcacaagcctgtgggaagtgaaacggatcaaagagatcgtggaagaagtgaaggcagaactgaccgcagagcagctggaattcggcaatccgcagcagggtatcatgatcgagactcctgcagcagttatgatgagcgaggaactggcaaaagaggtggatttcttcagtatcggaaccaatgatctgacccagtacacgctggcaatcgaccggcagaatccgaagctggataagttttacgatgcccatcatccggcagtgctttccatgatccgtatgacggtggaaaatgcacacaaagcaggtatctgggcaggtatctgcggtgaactgggagcggacaccagcctgacaaaagaatttctggcaatgggcgtggacgagctgtcggtatcaccgggaagtattcttccgatccgtaagatcattctagagacagatacagaaaacaggtaactggtgattctcacagatcggaggccgccggagagccttggggcggtcaggaatagtaaggttgtgagtgagtagaggggcgaacggacgaaccctggctcctcttctgttttctgtgtattgcagaggggagagaaaagtattggaaaagtagggcttgcaatctttgggaagatggtttataaccgttggcagaaaaagaaaattcttcggggcggggtgtgattccccagctcaatattccttgatttaaaaaggtttgttaaagtatagaaaaggtgtttacaccaaattgcataagaaaatcataaaactctcataatcagttgattatgggagtttttttgtagtgcgccttgcggcgcacgtttcgtttgcgcgccatgggcgcgctctcgcaggtgaaagtcctgaacatgcccaggtagtgggaaatgtatagctgaacagcaaggacatccccatattgtcaactatctccactcaccccactctttttcagtacatttactgaattgctattctcccgacttcctggcttgccatatagctgaaaaattatgaaatgttcctgttttttcacctacatatactaccgatgagcgtgtaaatttccattctacaatgtaaaaactctttgttgacggatatatttggataaggatataatctgtatcagagaatttacagggagataaataaacatgagtcaggatattattaataatcgttttttggaagagtcggtatttgctattgccgatggatactgcgtgatcaatcccacaaagagtattgtacgtggttccatgtatcaggtagttaatggaaaaaaatataatctgaatgaacaattaggtttgccggaaaattcaagcttacagagtctggtagatgcatgggcattgaccatacctgaggaaggtcttaaagattttctgcacgagtttgacagagaacgattattaaatcggtttgaaaatggcgaacgtcatatatcgttccgatactggaccaggactgctacttttgagcccatgcttgcagaagatcacatggctctgtaccgtgaagagaaaactggagatgtcattgcagttaattatgttcttgaccgtacagaacattatcgcttagaggaaaaagagcgggcactggaaaaatcaaacagagagtatgcgaagcttctggaagaagagaaaaagcatacggctatgatcgaggaattgacaaagaaactgcaaagtcagttggagttgtttaccgtatccatccctggcggcgtcaaaatcagtaatgatgacccggaatactctttcaaatatgtttcagaacaatttgcaaatatgctcggttacgcaacaccaaaggaactgttggacgcttctggcggtaatattatcggccttgctcatccagatgacgtgaaggtcggacttgcagatgcattaaatcaatatactcattccgatcattatgctactatttaccggatacgctgtaaggatggtacatacaaatacatcgaagatcgcggacagaaagtaataaaggaagacggaaccattgaacattggaatctcatgctggataaaaatgacttcatgcacaaatcaattgccttggaaagtgaaaagaaagcaaataaaagcaagtctgattttctctccaggatgtctcacgatatgagaaccccgctgaatggaattatcggattgctgaagattgctgagcaacattttgatgacagggaattggtcctggaaaatttcagaaaaatgcaggtagctgcagattatctattgtctcttattaacgatatccttcagatgagcaagattgaagatggaaatgtacctctgacgcaggaaatcatcaactttgaggaattaagccaggatgttctgactatcatagaacagcgggcaaaagacagaggaatccagatgcagttctgttcaaaaaaagaagggcttcgatatccttttatttatggaagtccgttgcatttaagacagatatttcttaatatttatggaaattgtattaagtataaccgaattggcggcaagataagaactgtatcagattatacagaagctgttgacggaattacgacatatgagtggaccataactgatactggcattggtatgagcagggaataccaggagcatatatttgagccgttttcgcaggaaagagaggatgcaagaagtacacagcagggaattggactgggaatggcgattgtaaaaggtctgattgaaaagatgggtggaactattgaagttaaaagcgaagaaggcattggctcaacctttatcatcaggattccgtttaaacttgctcccgcaccagatacagtaaagaaaacagcggcacagatggatatcagcggattaaacttattgctggtggaggataatgaactgaatgcagaaattgcggaaacgctgttgtctgatgaaggtgcaaatctgacagttgcagaagatggactgcaggcggtcagaatgttccaggagaaaccggaaggttattttgacgcaattctgatggatatcatgatgcctgtaatggatgggattactgcgacaaaaacaatccggtcactgaaacatccagatgccgagacgatcccgattattgccatgacagcaaatgcattcagagaagataaagaaaagtgtctggcagcaggaatgaatgctcacttggcaaagcctataaaaattgaaaacataaagagaattttgtgtgaatattgtgtgtagtggttgcaacttttcaaatctgtatactcatttttcagcagaggggtataataattttacagaaagtattgcacctcagagtcttcgttaagctttatgaaagcaggttaaaaaatcgttaaacggttgtttttatgggattaagggcgaaaaaagtatcatcattcagtaagaaacaatgagaattgtggaagaaaatccagcactgcggatactatcaccttgcacttgcaagtactaacatttataatgaaaaatatgaaatttataagatagaaagtaatgcaaaaggaaggcgggatagtaaagaatgaatgaaattatagaaagtttatacaacagaaaatcagtgagagtatatgaagaaaaagcaatcccaaacgagatgaagaatgtgattttagaggcagctatgcaggctccgacagcaggatgtcagcagttatatacaattttggatattacagatcaaaatttaaaagaagcacttgcagaaagctgcgaccaccagccatttattgcaaaggcaccgatggttctggtgttctgtgcagattgtaagaagtggtatgatgcttatctggaagcagggtgcaaaccaagaaaaccggatgtaggagatttgatgcttgcggtaacagatacagccattgcggcacagaatgcagtggtagcagcagaaagctttggcattggttcctgttatattggcgacattatggagaattgcgaagagcagagaaaactcttacaattgccagaatatgtatttccggcagttatgatagtatttggctggcctacaaagcaacaaatgaaacgtaaaaaaccagaacggtgtgaacagaaacatattgtgcatgagaatacatatcgtaatatggagggggatgaattgcgagagatgtttgcatataagtgtaaaaacagcacctacgaagagtggtgcagtgcattttgtaatcgaaagtataattcagacttttcgaaggaaatgagcaaatcagtaaaagaatatttggagcagtttagataaggtgccgtttagggacggggtttgctggctttttttgaccttgcaggataaaaattgggaaggtgaaaagtttcactttcccaatttttttaatatgtgcgccttgcggcgcacgtttcgtttgcgcgccatgggcgcgctctctcaggtgaaagtcgtgtgttctgcaagctgttatcagcttgccagtgaaagtctggtcaaggtaatcgccagtgagccttgtagcgagcctccaatgcttttgggtgactgattgtgttgaagcgaggtatgcctgtgagaaacaggtgcaaaataacagtccgtaacataaagtgaatcctgtagcatcgttacgttagccccgtaaggggacaagagggagtcgagtcactgactttctgacgaagaccatggaagatgtggagatactggagtacagcattgaagaacccttcggtgtagagggagcggaatgttatgaaagttgataacggaacaggagagatctcataccatcatataaccacaagtatgtaactgaggatataagcacgcatgcgaaatttcttgggaagtggtatgagaagtcggaggagcccatagtatctatgaactgttggtaagaaaaacaatgggagaaaaggggctctgctttaatcaggattaacgggaaggtaagggatagtgcatgccaaacattggacaacaacactcaatagaaaaatcacgacaacttcaacgtaatctatacctagcagccaaaaaggataagcaacgtagatttcatgcgttgtatgaccgtatctttcgcctggatattttgtggcgggcatggaaaaaagtacgagaaaacatgggaagtgctggaattgacaacattacctttgaaatggttgaggaatacggagtagaagaatacctgttagatattcaagaagatttgcagaataagaaatacagaccaaagccggtaaagagggtatacattccaaaaccggatgggaaacaaagaccattgtagtagacggattaacgatgaacaccgtcttgtatacaatttcgacacacatcaaaacttaattatttttgcctgtaaagggcattatgaagagtaaaggacaggattagcctgttctttttttgtgttaaacataaaataaatttctaattatcttttcataagttcttataacaccgatataccctattttacaggctttatcggtgttttctttttggcagatacttcttataaccactcataaatctgcatatcttgtctttttatcgtagtaaatttcgtagtaaattactaggctatcagacttcgcatttccatgtttgctcctgtctgtgaagcatgggcgtacaggttcagcgttatcattatgctggaatgtcccataatgtattgcaggttctttgggttcatgtttttctgtgctaatcgtgtacaaaacgtatgtcttaatatatgcggggttatcttcggtaagggttcatcatggtacttattgtatttctttactatatttctcaatgtagaagtatagtaacaagctgtcataggcatacctttctgattaagaaacaggaaattgcggtaaccgtcaattacaatcccttttccagtttttttgcgtttcaacactctttgaaatgcttttcctgcttcttcgctcataggaacttttcgtatgccacactttgtttttggcgtttctatataatatccctcttgattgcgtaataactggtggttgatattgagtgtatgattttcaaaatctaaatcctgtacagtaagtccacacaattcagatattcgtaagcctgtttttaacagtatcagcacatcatcataatatttctgatacaccgtatcatactggagaaaggacagcagtttttcttcctgttcctcactcaatgcctgtctgctttcgctgtcatcatcaataacctcgcttaactgaaaatcaaaagggttcttccttacataatcgtcctcgattgccatatagaaagaagcctttaaggaacgcttatagttactaatggttttgaagccgtagcccttttctttcattctgaccgcccattcttttgcgtctgacggtttaatgctgtctatgcttcgtgaacccagcttgtcctgtttcaatgcgtccatgagatattttcgccctgctagtgtattcttcttgacattgattctctgtgccgtctttttggcatatagttcacacaatgtcattttctttcctttggtgtctattccgtcctctaaatcacgctgtatctcccgttccttttccctaagagataaatcatcacgctttcctttcggtactctgtccgtagccaccagtttccatgaatacacaacctttgtttcgcctgcacgattaacatatttatacatatatctgccgtctgccctttggctctctccagtccttaaaatgcgacctttgttatcccgtcttttttctgacatctttcaaaactcctttcaaaactgaaagagccttgttacgacatataagtatcatatcatgcacaaagctcttttgcattagatttcttccaatttatcaatcatatgttcaaatttctttttcttaatcagcatacggtttccgttcatcacaacacactcgtctttatattcacttgcaatacggcggagtttgttctctccgatacggaaataactggacgcttcctcaatcgtcataaggtagcgttcccataatggtgtatttaaatcatacataaaactgcacctcctttcttttttgatttttaaacagtctgacggcttttatcatagcccacaggagttccacctctgcatagttcttatgtagccgtacccattgcgtgcgacgctctgaacgctcaagctgtggctgtacgggagtatcattatcagacaggacaggtcatggcgataaaagaggataaatcttttacatggacgctgacagtttccgctcgctttaaagggaaaaggtcatggcgtatcagctccaacggctcgctgtctgtctaatgtatcagactgctttattcagttgtcaaagaacacgaaagaagaaaatcatctctcctatataccgcgttggaaaagagaggaaatgtaaccaaaattcaaacattttttcttttttcactactatctgtatagcaaacgtccatttgttaagctggtgatgaaaaaagattatttttcttttcacaccctaactacccaaaccatactgttactgccaacaatagaatgaaatattttcttcactccatatcaggacagaatagcgttatttgtatcacatttcttaaacttttttctttctacgccatatagggaacggaaaccttaaattgttaagttgaggataaaataattttctctttccgcatcaacactcaacagctaatgcctgtttgaatacaaatcaagaaataaagtgtgatttcctctttctgcataatactgtccgcttaactcgattttccgacatttttttcaaaacttttttcgtctttcacttcatatagggacagcaagccaaaatttaatgacctattttcaaaaaaagtttagatttcctcaacttcactccatataaggaatagaaaccttgttttgttgcagatttttcaaaataatttcaatttctttttaatcttcgtgtctgtacaccgagtaaaaattttatgaccccatttcaaaaatagttagatttccttttctcgcaccatatctgtacgcaagtagctgttttgttgcagatttctgtaaaaaatttgtttttcttcttttaataaacatagggaatgaaaaaagctctttgttgactaaatctgaaaatttccattgcattaaaaaataccgttattctttcttttaaataacggtatctctatttataactcattaaaacagattaaactaaatggctaaaaaacaaaaagtaggaggaagtatgtgtcacaactttgttttggtttatctttcaaacatatcattctatgtttattcccgcacgacaaatattccgttttctgatgtatcccacataaagttttccctgtttacagtttgttcagtcgcaatttcaattttggatagtcctatatctgagggaacatcatcagctttatagaccatataaaaattcaaataatattcatttttagaagttgatatatgatacattccgtctaattcaagtcgtttatttccattattattttcactagatgatgcacaatcaccagaatattcttgtatatctccatcaataaattcgaagaaagaagaaatttgtttatttatatcctctatgtcttttttactgttttgtgaaaacaatttttcaaattcttttacattgccttcattgtataaatctataatttgtttcatcatattatctgatatttcttgttccgatttaaaccaattagacatatactcatttctatttgagccaacattcgtacacccacagaaacttaacatcaatatcatacaaaaaattaatattatttgtttcatattatttatacctcatttaatacttaaatattttatatctatataacctatatttacattgtagcatttagctttaaacttgtctttaactttctccataaaataaattattgcttttctaaaacatcgtcattctcttgtggaatagcggtatctattcgttcttctatggttgatttttctaattgtaataagtgtttatgcttgtctttaagttctgcctgttcaatcatatcttttagtatcgttgtatgattttctctgtctaatgcctgtaccatttttatggttggtgcaacctgtctttgtaaccaatgcaacgctttttgtaaagtataaggttctggctttgtagttaagcgtatcggttctctgttttcccctacaaaccatgcccaatcatcatttgttttccattgattttttggcttgtcgtcctctctgtcaacaaagcggacataatgattgatgatagaaaaagcagtgcgttcagcgtcccgataagtcagtaaatctacaaccgcataataggctcgttcattcttcatgcgtatttcaaagcggttcttaatctccgtatcttcaacttctatgctattcttgacatactgctcataatttttctgataagcacacatatataattcactgcttgttgaaccgagatataaggtttctcctgtattctttggtaaatcgctaccacatttttccgtaccgctgtaatctttctgcatacgaaagtaggagatacattcgccagccttgtatttttcctttaactttggaatatccaatattcctgctttatcattgattgccaagtcaagccgtttcatcttaccacctgccgttaaacaatcaagcatgaagtcataccatgagcgttcctgtgccaatagataactttccatttgacgacagcctctgcctttcagttccaataaaacacctaaatgctcttgcatggaacacatgacattgatgtcgcctaaaacatatttgctttcatatccgtattttccataatcttcataaagcatataatcgggttttagttgtaatacatcacggataatcgccaatgcgtccgtagtaggaaagcgaacacggaagtaatcaatcaacaggaatagtggttcttgtggattgaaacgctcaatctgtttttctatgactccttttaattcgtcattcaatggctgtttccctttttcaatgcggttgtaatattcacggctgataccacaagcaacagcaaggaatacgccgcactgacaccggatcagctgaaagtcattgacccatgctccggttccggtcatatcttagcgtatatgtttgatgtgctgatgaagatttatgaatcctacggttataccacccgtgaagcggtggcaagcattgtggaaaacaatctttacggtttggatattgatgatcgtgcggcacaggtggcttactttgcggtaatgatgaaagcccgtcagtatgaccgccgctttttcagtcgtggcattcagccccatgtgtatgccattgcggaaagcaaccatgtagataaatttgctgtggactatttctgtaatggcgatgcgaagctcacagcggctatggacaccgtcatcaacgaactgcacgatgcaaaggaatatggttctattctgacggtaacaccaaaggattggtctgctatgtatgaccgttttgctgagattacggaagatataaatatgtcccgtgaaacagcattgagagaattactgccgttggtacagacagcgcagatactggcacagaaatatgatacggttgtgacgaacccgccatatatgggaaaaggaataagcccaaaacttactgcttatctcaaaaaaaattatgatgattcaaaatcagacttgttttctgtgtttatcgaaagatgtgtcttttttacggagaaaaatggtttctgggctatgattactcagcattcgtggatgtttttgtccagctatgcgttcatgttggcatatccaaacattttatccacattttgtaaatatagtttgataagttcctttttttccatagagtacctcgtttcacttataaaattttgctatttgctacataaatgcttcttttggaaatatgagatgggtcttgcatcgaatccggccatgcgaaagcaggtcaagaattaccgtgcttatttcaatgcgaaagaccgccgattgaaagtcagcacacagaataaaattcctgcaactcctgcacagctgcacatggctgtcatggcggcaatttgcggattgaaagacgcacagccgaatatgattctccgtagcgtgttccgtgccggactggatttgaagaacaatactgtttatcaggatttcgtaaaatatcatgctgacggtgcattttgggcgatggttcgccagggctgcggatttgtggaggaagaacctgacctcggaagactggcaattcatttgctgctgactgccgctacccgtactatgcgacaggaatatcttgctggactggacagctttatttccatgccgcatcaggcatattgctatgattttatttctgagtggcttcacagtgaggatagtcaacagttatacgatgtggcacggtacgttgaagatgaagcccgtctgcatcagcggtttgaaaagctgacagtagacgatctggcaggaactgagtgctttccgtgcattaatgaagtgattctgacaaagctgatgacagagatcagcgaccatatcattgatgtggacaccattacttccactgttgaaaagaggagaacctgtgtgtggtatgagccatttgagaatttctatgacggtatcttgcaagtggcaaatatgcagagcttcttcaaggaacactctgccggattccacaccgcagatgcaaaaggaatttggaaagaatatacggaaagctactatcagatggatacctattaccgtttgttccatctgagcttccaaaagagcctggagacttccaatattctgttggatgacttgtttaagcacgttgtcgataaagtggaaggactctatactcactggttcttgggtgaattgggtaataactggtcagatgtatgtgcggatgaactggcaacctacggtaaggttttggaagtgccacagcaggaagaattttatcgttctcgcattaagacttcagataccaaggtatttgtgattatttcggatgctatgcggtatgaagtggcggctgcgatggcagatcagcttcagagagaaacccagagcaaggtttctatcagcagtatgcaaagcatcttcccttctattacgaagtttggtatggcagcattactgccgcataaagaactgacagtagaagttcggaacgatattttgacggttttggcagatgggcagtctacggcaagcacttaccgggataaggttctgaaatcagaagatccggcgagtgtggctttgaaatacaatgacatcattgccatgaagcgagcagaacgaagtgcgctggtaaagggcatggatgtggtttatatttatcacgataccattgatgaagcgagccatacttctgacacagctgttttttctgcctgtgataaagcaatttcggagctgaagaaccttgtgcgtattattgtaaatgaatttggtggcacaaatatattgattacgtctgaccatggattcctttatacctatagttctttgaaggaagaggataaagtagataaaagaggtttttttgatgtggatgtcacaaactctgatactataaaaaaagaaagtatcaggcggtgtgtagaatatggaagaagatatgcaattatgcagaaaggtgtgcaacctgattatttgatgcctgtaaaatttttgaatggaaatacagaatttgatggatttgcaccgagggaaagtatccgtatcaagatgaatggcggcggcatgaagtttgtgcatggtggtatcagcctgcaggaaatggttgttccggtgattgagtaccattatctccgcaacgattctatggaatacaagagtaattttaggtttattaactacaagcagtttgaacaaacaaaaattttgccaccaggggaagatgccattccatttgtgggatggtatatgtattgcggagtaaagacacatccagatttaaaagatcgctatatgtatccaaagcctaagaatcagaatgatttagtgttcgcacaagtagaggttcctgaaaatcaagtcgtatttagtgacgcactcggatggtcagcaattagatatggggaatactatccaagttcaaatactattgaagaattggaaaaggaattgaaaacttttaatgaattatcagattttgagcagattctatgggtcgccgagtcatgggaacgagtatttgatgtggatccggaaagtgacttcgtatttgggagtttttggaagttgacacctaaaatgctgatcgaatgacagagttcgaatgaaggggggtggttccattgggctaagtattggaaaatagtataactgtaaacaaataaaataaggagtgagagcaaatgggtgatactagtgtaatggcaaggagacttgcagacggacatgttcaatatggatggtctgggaatggcggatactttagagtcgtaggtttgagattgctagcatggtataaagatccagaagatgtcgagtatttgtttggcttaggtcaaactagttttatcgggaaaaaaggaagtgaaaaaggtggtttcggttggatggaaacacatagcctgaccggtgaaccatgctggttggatcagactgagcgtatgatttttagtaaattggcgtttgtggattatggttacttttatgatgcagatcaaaaatggtactatattgttcccggaccatttagaattaaaatgccgttagaacttgtctacaataatttagatgaggatgattttgaatttgattttttggaagaaattcaggacaaagtcctgacgtatattcttacagagtatattgaaaatcatccgaaatttgcagaagtgctgaaaaaggaaggttatactcctgaagaaattatgaaaacaattcgggaaaaagaaagtgggttactgaatatgtatcgcttctttgcgaaatacaggaatgtatttacatactttgatgattggatcttagtaaaagcagatgaagagtattctgaagttacagagattgttgtcaaggaaaaaggagttgcccatattgaaaccaatttgtggtaagaaaatggtagtggttagagcagtgtaaataaacaaaaggtgccgttttatatgcaaaaagatacagcggcaccttattttgaaattttaaataattcaatttcggcttccgttagatcaactaattttttgtcatgttcttttgcatatctcgatagatttaaaagatccacatgacaagaagggaatgatttgtaagggtccggaagtgaatagtaattttcaggaagtgttttactttttaaaaatacgggtttattttccataattatcctccatacttgctaatacctattatacgacaaattccgagccgtttctacatactatataggtaaggtaaaaaattaaatatactttcaaagggtgagcaaaaggagggatgtacatgaaagagatacctttttgggagaaaagcaatttaacattagaagaggcggctgcttattcaggaattggagtaaacaagctaagagagttgacaaatgaagaaggttgtgaatttgtgttatgggttggtagtaagcgattgattaaaaaacaaaaatttaacgagtttattgaaaaatcatattcgatataattaagtaatatagaattgtgagaaaacgaaaagatggaaatcaagagacaagaagttgggagtaaggtgaataaatatggtaaaaaagagaaaagacaataagggaagagttttgaaaaaaggtgaatcacagagaaaagatctgacatatatgtatcgatgggttgaccgaaaacagaatcgaaaaacaatctatgctaaaactttggacggattaagggaagaagagaaaaaaatagagttagaaatgcttcagggtatcacaagagacaacataacattatcggaaattatagagacatatttagacacaaaaatatctttggcggcaagtacttatgaaaattataaatattattttgagaaacacataaaaaatgaagcagttggaaaaatgaaaattatcgacataaaaaaatcagatttgctacggtattatacggataaatccagagtggctaatatgaaaaatggtacgatacatatattaaacaagatcattcatccggcattacagttagcggtggaggacgatattattcggaaaaatcctgcagatggaacaatgaaatattttcaagttgaaagcgaaaaaaagtatgcgctgtcaatgacggaagaacaagagtttctggaacggctggtaatgaaaaactggtcgaaatactactatcctttcttcacgatattgctttatacaggcttacgtctgagcgaagcattaggtctcacatgggaagatgtagatttgaaaaataaaatgattgatatcaatcatcaattacaatatcggccaattaatggaaaacagaccttatactgcattgatttaagaaagggagaagctaggactaaaacggccagtggaagaagggtgattccaatgactcctaatgtttatgaaatgttctgtgaacagagaaaaatctggctttcgatgaaaaaagatccggattttgaagttgatgggtataagaattttatctttttatcaaaaacaacagggagaaatctgtatcctgttaacatcaggaaaactctacaacgaatagttaatatgaatgataccagagaaatacagcttcccaatatttcgccacacatattacgccacacgacatgtacaagatatgcagaagcaggaatggatatcaaaaccaatcagtatttgctcggacaaagtgatgtaaaaacgacaataaaagtatacaaccatgtagatatggaaagaacaaaacgtgagcttgcgcgggttgaaaaatgggaaaaagataatgccgatggttacaccaaaatttacaccaatttgcagtaatcatataaagagtagtgtagatttatgtggatattacacaaaatcattgtgaaaaacagctaaaaaatatacttgtatgcagacttataatgagttataatgaacaggaatttaaggataattcttcggggcggggtgtgattccccaccggcggtatagtccgcgacccatggaaacatggctgaaccggtgtgattccggtaccgacagtatagtctggatgagagaagagtgcagcgtgtgtaagcgtaaaatatagattttctgattttatatcaggaaagaaaaagcacagagagaacaccccggaaaggatttactttccggggtttttttacgcgagcaacgagccaaagtccgtgcctgcacgagaccttggtgactgccgcgataacttgagaaacgcgcgaagcgtgtttctcaaagttttgtgtcaggctgcagaaaccgggaatttccttttgagaaagaaaggagattgaagaaaatgaacaacacaacaacaaaagcagcagagactgcgaaaaaggccggaactacgagaaatacaggtgtcagaaccatggtgcagattgccatgctggcggctgttgctactgttttgatgctctgggaggtaccgcttccgtttattgcaccgagtttttataagatggatctgagtgaagtgccgatcatgatcggggcgtttgcgatgggaccgctggcagcggcagtgatcgaactgatcaagattctgctgaactttgtcctgaacggaacaacgaccgcaggtgtgggagaacttggtaactttatcatgggatgcgcactggttatgccggccggctttatttataaacaggcaaaaacaaagaaacatgcaatcatcggtatggcaaccggaatcgtatgcatggcagtggccagtgctctggtgaatggtctgttactgcttcctgcttacggaaaagcatttggtatgccggtggatacctttgtggagatgggagcagccatcattccggcgatccacagtctgacaacgttctgtcttttcagcgttgcaccgtttaatattataaaaggtattgtagtttccctgataactctggtattatataaacatatcagccggttgttaaaaggctctcaggcataattgattcgtcctgtacaaggagcctccgaccggggtgggaggaataccagatgggaaaaatcaataaagtaaacaaacagacaaccaatccatatctgaatctctatgatctgaatgtcgtgaataaagtaggacgggaagatcattattatgtggcatcccgggcgaagactgaggatgacctgaaactgagccatgcagaaaataatgatccggacggtgtggccatctacagtctttacggagaaaagaaagacagggtagtactgatccgacagttccgttatccgctgggtggttatgtgtatgaactgccggccggactggtggatccgggagagaattatcacaccgcagcgatccgggaactgaaagaagaaaccggactgaagctggagccgatcgtggtggatgatatttatcagaagccttattatacatccgtcgggatgaccgatgagtgctgcggaacggtttacggatatgcttccggcgagatcagtaaaaaatacatggaagacagcgaggaaatcgaagtggttctggcagaccggaaagaagtggcacggatcctgaaagaagagcgggtggcgcttttgtgtgcctatatgatgatgcactttcttcacgatgaagaaccctttgcgttcttacatgccaaagaaaaataaatccgtaccaggtgcataaagcgggtcagtagtattcacgaaaaagagacagaggagaaaaaatattatggaatactgggatatctacgatgaaaagaaacagaaaaccggtcgtacgatgaagcgaaacgactggaacatgaaaccggatgaataccatctgacggtgcttggtgtgctgaaacgtccggatggccgctatctgatcacccagagaaagctggacaaagaatggggtgccggctggtgggaagtaccgggaggcggagtcaacgcgggagaagattccagggacgcagtgatccgcgagatccgcgaggagaccggaattgatgtgagccaggttgcaggcggctacgcattttcctataaacgggtgaatccggaggaaaaaaacaactattttgtggatatctacaaatttattctggactttgtggataacgatgtgaaagtacagccggaggaagtggaaggctttaagattgccacactcgaagagatccgggcatttgcccaggaagggattttcctgcattatgacagtatgaaagaagtattcgattagagcgtgtctgagaaaatataagaagcagttatttctgtacatcagtaagtgtacagaaataactgctttttcactttaccggaaactgcttttctgtaaagtaaaaacactctgtgaggatgcgcactgcggcgtataaggcagatgtcgcaggcgcgggaatgtggcaagacacattctttgtttcatgcaggaaagaacgaactgtcagaccgcaaagaaaacagctcatgaagatggatacgatggcatccgggggacagaatcggtgatgttggtaaatacatacaaaaaacaaagatgaaaattatgctttttagcaatggatttttcaggaaaaaagatataaactcaacttatgattaagatacaatcaaaagtaaaaaacgaaactcaatgtatccacagaagaaaaagattcatgtggataacagataacagaaaaaagaaagaggaggatatttaccatgaaattaacactggatggaatcaaagatcgtcaggcatgggaaaaagcaggtattaaactgccggggtacgatgtggaagcagtatcgaagaaagcaaaagatgcaccgggatgggtacattttggaatcgggaatattttccgtgttttcatcggtggaattgcagacggacttctggaagaaggtgtcctggatcgaggcattacctgtgtggagacctttgattacgatgtgatagataagatctataaaccttatgacaatctgagtctgagcgtgatcctccacggtgacggaaccagagaatacaaagttatgggagcgttggcagaggcggtaaaagcacagtcacccgatccggaacagtggaaccgtctgaaggaaatcttcaaagcaaaatccctgcagctggtttctttcacaatcacagaaaaaggctatgccctgcagaaagcagacggcagctggttcccgtttgtggaagcagatatcaacaacggcccggacagagccaccggagcaatggcggttctgacagcgatgttgtatgaacgttataaagcaggaaaatatccgatcgctctggtttccatggacaattgctccaaaaacggcgcgaaactgcgggagtctgtactgacgatgaccgaagaatggaagaaacacggttttgtggatcaggattttatggattatgtgagtgacgagagtatcgttgcatttccatggacgatgatcgataagatcacaccacggccgagtgagcagatcgctgcagacctggaagcgatgggcgtggaacagatgcagccggtgatcaccggaaagaagacctatattgctccgtttgtcaatgcagagaaaccacagtatctggtcattgaagacagcttcccgaacggtcgcccggcactggaaaagggatttggcgtatatatggcggacagagaaaccgtgaatctgtctgaacgcatgaaagtgacagtatgtctgaatccggtacattctgccaccggtccgctgggtgtggtacagggatatgaactgtttgcgcatatgttaaatacaaacgaagacatgatgaagatggcacggatgatcgcctacgacgaaggccttccggtcgttccgaacccgggtatcctttccccgcaggcatttgtggatgaactgtttcatgaccggttcccgaatgaatatctgggtgataccaacatgcgtctgtcagtagatgtatctcagatggttggtatccgctttggcgaaaccatcaaggcttatgtaaagaaattcggagatgcttcccgtctgactgctattccccttggaatagccggatggctgcgctacatgctgggtgtagacgacaaaggaaatacatatgagcttgctccggatcctatgaacgaagagattcaggaacagttcaaagatatcgtggttggaaaaccggagacttttacgaatcagctgaaatcgattctttccaacgaaagactgttttttacagacctgtataaagacggtgtgggagaaaaaattgagaccatgtttcgtgagatgcttgcgggaccgggagccgtgaaagctacgatccataaatatgtaaaccaataaaataatgaaaaagagaaaaggactgctgttcggtaggatattattctgccggcagcagtctttttgattgcattgcataccaataattggtccggtggatcaattttgatttacacgggcaatgagccaaagtccgtgcctgcacgaaaaactcgaggagagtgtttctcatagttcaagctgtgtggataggacatccggggaaaaagtaaacgggaaaaagcggcttccatatattatagtagaatgaaaaatcatcaggaacggaacatgaataatcagaaaaccggcaacactttaaatcttgctctcgatgccacatcccgggaacgggaagcatcgatgaatctgaacgcagggtatgaaaaagacacacagaggtggaagctgatcattcgttacttcggggcggcatcggagctggagacggatgagattgttattacaccccttcttggaaattatggaattgtagatattccacaggatcagatcgaagggtttgcacagaatccggcggtagagtatatcgaagcaccgaagagattgtattttgctgcatatgaaggcaggcagacttcctgtgtgaatccggtccagaatcagtcgccgtatctgtttggtaaagggattctgattgcctgtatcgattcgggcgtggattatacgcattcggactttcggaacgaggatggatccacacggatcctgcggctgtgggatcagtcgatcccgggcaatcccccaaaagggtatcggatcggcagtgagtacacacaggagcagatcaatcgggcactggaagcgaatacgatggcagaaagagaggcgctggttccaagcatagatacgagtggtcacgggacggctgtactggggatcgcagcgggaaatggaagagaaagtcagggaacggagcgtggcgtagcgccggagagcagtctgctggtggtgaagctggggatccgggatccgaatggatttcccagaaccacagaactgatgcagggggtggactatgcgatccgtaccgcacaggagcttcagatgccggtggtgatcaatctgagcttcggaaacagttatggagcacataacggaacatctctgttggaaacgtatctgaatcaggcggttgggtatggtcgtgtgacactctgtgtgggaaccggtaatgaaggaaatcgggcagggcatacggcgggccgcgtacgacagggagaaaattatgaggcagaactggggatcggaacttatgaaccggctatgaacctgcagatctggaaaaactatcaggatcagatggagatttccctggtacatccggacggaacgattatcggtccgctggaacagacgctgggaacacagagataccggcatgcaggaacacagcttctgatttattatggaaaaccgtctccttacagcacttcgcaggaaatctacatcgattttctttccacagaaagttatattgacagcggcatctggcgtatacgtctgattccgcgccgtatcctgcagggagaattttccatgtggcttcccggtggaaaaacagtaggggaagccacccgattctaccgcccgaccccggaaaccacacttacgattccctccactgcgctgtctgccatctccgtagcagcctacgattcccgccgccagtcctacgccgatttctccggtcgtggttacacccgcctccctgttcagatcaaaccggaccttgccgctccgggcgtcgatatccgtgcaccacgtccgggcggtggttatcagacggtcacgggaacctcctttgcaaccccctttgtcagcggagcggcagcacttctgatggaatgggggattgtgcggggaaatgacccgtatctgtatggggagaaggtgaagagctatctgatcaacggagcaaaacagctgcccggggagagggagtggccgaatgcgagagtgggatggggagcactttgtatagctcagagcattcccaaataagttatactgcatagagattgatttcataaaaattatatcgtatgatacaattgtaatttgaacgagatatatacggaggaatatgcatggaaaatgaaatagtattatttgaaacagaagatcatgaagtcaagttacatgttccagtggaaaataatacagtatggctgaacagaaagcaactggcagaattgtttggcagagatgttaagacgataggaaagcatattaataatgctttaaaggaagagttggataattcagttgtcgcaaattttgcgacaactgcttctgatggaaaagtatatcaggtagagcattataatcttgatatgattatatcagtaggatatcgggtaaaatctcgcagaggcgtagaattccgaagatgggcaaatgatattttaaaacaatatattcttaatggttgcgcaataaatgaaaagcgtttaattgccctgaagaaaacggtaggcatacagactaaaatgttagcgtgtacattggaagttgaagaagaggatatattgaaggcagtaagccttgaatgattgatttttgaaggagggattgttataattatttttataaaaatgtaaaagagagattgaaaagggtgaaatgtaacaatggataggatattgatgtttgaccataatattaaagatatagggttgtatacacgaccatcaactcagggagaagagttagatttggttgaagattttattgaatattatatttataactttttaaaaaccaataaaacaagtaatttggctgtatttgtggaacctaaagttgcatctggttttcctgacattgtatttgcagcatattcacctaaaatattggagaattggtcagaagaaagagaaaatttggaaactaacgatttaaaagtgttatctcagttattgatgacaaaaggtagcactggaagtgaattaataacaagacttaaaatgccagaaaaagatacaattcaagccatagaaaaattattagacgcacatatgatcatacgtgagcaggggttatggaagcccgtagatatcaaaaagatatataatataagaaaactaatttcagtagaggctaaaatgacggatataaagaaagttgctgaacagtcacttatcaatacatggtttgcttctcaatcatatgcattgacaaatacttcaaatccgcaaagtagcacgattaagaagtttgaaagacaaggtacaggtttgtattgcaagaagagaagttttagaaaaattgtagaagcgaaaaagttagcatcgccgtcaagttaccagtctttacagtttaatgaatggattggaagaactgttgcacatttaagttaggagaaatgagagatgagaaaatttcaagaaatgtgtcaagaagaatttggaaaaattgaattgatggcacgtggtggacagaagattgtgtttgatggagttcataattcatatggagaaactgttattaaattatattttcagcttaatgatccaaggtctattagggaaattcaaatagaaaaaggtttgagtttatccatggttccaaaaatatatgaaaaggggatcatagagtatgaaggaacagaaacattatatattattgaacaaaaagtaaaaggaacagagttgcgaaaagtgcttgaaagtggtaggagattttctttagaagaagcagtgatattcttggaacaggggttggaatttatttcttgcatagagaataaaggtattgtgcatagagatattaaaccagagaatattatacgagcagatgacggaaagatattttttctggatttcggaattgcaagggtattaggagcagattctttgacaaggacaggcgcgatgatgggaccgcatacacctggatatgcggcacctgagcaatttaataatttaaaaagggaaattgattctcgtgcagatattttttcgttaggagttgttacttatgaatgtattacaggaaaaaatccatttagagaaggatctataaatgcacttgaagttttacaaaagacagaaactattacgcctgtacagtattcgattaaaggggatactcaaagtcagtttatggcattattaggtgcaatgatgggaaaatatccatctagaagacctagaactgctaagcaagcaatggattggttaaaagtagctaagaatacatttgtttatgaatagaagaggttgaagaatggaactttttatacaaatgggacataatatgcaaacattatctctagagcacttagaagagtttgagggtggaacgattattattagccctatgaatattttgccaaataagataaaaggctatgcaactaatgtgcataagaaaaaaggaaagatacttgttgatccacaattatattatccaagacaatatcaaaaaaaattatcacagtatgcatattggccacagagtgatattacatcattagaaatgggacaatttgatacagtagtagaagaattatcaaaattaaatagtgaagttaaggcagaggcatttctgttaccttctattacagccaaaaagatagatgaactatggaataaaatacagaaactaataatagaaagtgcgaaaaaatatgcacctaatatgaaatatatacacacgatttcattgggaagtgatgtactcaatgatgaaggacagattgaacgggtaatagaatatgctgaagaatgggatgtagaaggtgtatatattgtatgtgagcatcctgaacgatattatttagtggatcgaccattgtgggtatctaatattatgtcattagtggcagggattaagagacagcggaagatgacgattgtaggctatgcaagtcatcaattattatgtatggcattagcaaaatgtgatgcaattgcatcggggaattttctgaatttaagatggtttcaaccagaacattttgaaacaattgatgacaaacaacctagccgtcgagcagtatggtattattgtccacaagccttatcagagtataaaattccttttttagacattgcaaaacgtatggaactgctgaatagaattgaacctcctgtaactatgaaaaacaaatatagtgaaatgttgttcaatggaagtttaccgtcatcaaccggttttggagaaaaagaagcatttagacattacctttattgccttcataaacaatgtcaaaatagtgttttagaaacttatgaggaaacaaaaaatttgcatcttttaatgttagaaacagccgaacagttattatctggtttaggggaaaaaggaattaaaggtcaagatcgagattttactgaaattttggatgtaaatagagcagctatttcagcttttgacatggcttatcattttccactctctcaagaatggaaagatttatagaaagtattatgcagagagggattagctgtagcaatgacgtaacatcctcgggaaccctatgtacagcacaaagtctccctgaaatataaaaaacccgatcccccggaccagtacagacaaagttccggtggatcgttttactatatcagtgaatctgttggcccactgtctttgcacttttccggttcagccagaggaagaacccgatgttcaggcagataccgactgctgtggacaccggagctgcgagaccgattctggtcaggctggcattcggctggatactcatataataggacaggggaagtcggatcagaagagtctggatcagtccctggcacatcacccagaaggttttgtcatttccgttaaaatatccgatcatactgaacagcacggcagtaagcagcgtctccggggcaaatcctttcaggtaggcgtaggcgttccggataacggaactttcggtagtgaagaaaccggagagaacatcgccctttaacagcacgagtgcgaagacaaaacaaccgaaaaacaacccaacaccgataccggtaaacatggatcgtctggcacgcttctgattgccggcccccacgttctgagaaacgaaagacgccatggactgcatcagagagcttgggatcagcatggcaaagttcacgatcttacaggcgaccccataaccggaggaagcttcgagtcccagacggttcacaaaggcacacagagccagaaaagaaagctgcgtcaggcactcctgcagagccagaggaagaccgatggtaaagaactttccacactgatcgttcagacggaaatcagacctgcagatcttaaatggcagtttcttttttatcagaagaataaccgcacacaccacactgacagcctgtgcaaaaacggtggcaagggctgctccggcagcatccagatggagtccggcaacgaggatcagatcaccgacgatattgacgatacaggcaacgagaacaaacagcagcggtgacttactgtctcccagaccacggaagatcgcggccataaggttataggcaacgatgaagaaaataccgcttccgcagatacgcacataactggtggtcagatccacagcttctgcaggggcctgcataagtacggcgatgggatgtgcaaaaaccaccatcaggaaaaataaaacaatagaaattgccgcaaaaacgataactccgccaccgatcacagaaccgatccgttccggccttttttcacctagatagcgggcgatgagaatagtgatcgcagtagcaaactgaatcacgacaaaagtaacgagatttaggacctggcttcctgtggaaaccgcggaaagtccggaggtggaaccgaatcttcccactaccagtaagtcaacggctccatacgcagcctgtaataccaacgctcccaggatcggaagcataaagagggcaagttttttcagaatactgccctgtgtaaaatcattttttgcatttgtcaaggtcaggtctcctttcacacataatctgatgtaccgcatcgatggtgcggatcgtacatttcacatcttcttccgggatatcttccataaaagaggtgagagtggtaaaaaactgttcgttgtagatacgggacagctccctcccggcttctgtgagagaaagataggtgacacgaccgtcttcggaagaggaaatctttttcagataacctttggcctccatcgctttcaccgtccgtgtcacaccgggtctcggcagatccagcgcatcgctgatatccgatatcttcgcccggacaccctgcttctccagcatctcaataatatccagataatgaatatacgcaggagtcacccccgccggcagagccggaagcatcccccggacccgctgcgccagataacaggcatccatcatacgtttcataagttcaacgtccattgcgatactcctttaataataattattgatagttgcttaatataattaccattgataattaccaatgataattatattaagacagtaaagaaatgtcaagcgattcttccagggttactgttcacattgcagtttcctgtaaaatcaggtagaatagaacacaggaatatgaatcatatatggggtaaacacggatgaagaaaaaagaaaaacgaatagcatatatccttcggacaggaatgacggtactcacaatcatactgattattttgtttttcggtatcatgtcgctggtcagtgacctccagggtacggcaagggtcgtaaactacgccggactggttcgcggagaaacccagcgggtgatcaaactggaaatgtcaaaggagccggatgacgagatgatagagactgtggaagcgatcatcaacggacttcgtttcggaagtgacgaactggatctggtacggctggaggatataaaattccaggggaaaatggatgaacttgcagcttactttacggaattaaaagaagaaatctcgaaagtacggcaaaaaggctatgaacagacagcaataatcggcatgagcgagaagtttttccagatgtgtgatgaggtaaccggaattgcggaacgatattcacaaaaaagagcgactgcattgaatcatcttgaaaagattgtagttgcagatattgtctgcctggtacttctgatcggtgtagaactgcttcgggcactacgctttgcggcacaaaacaggatcctgcgaaagaaaatctatctggatgaatccacaggtctgccgaacaaaaacaaatgcgaagagatcctgagcgatcccacacctctcggagaagaagagagtacagccatctgtgtgtttgatctgaataacctgcgaatcatcaacaacaatctggggcatgacaagggagacgaatatatccgttcctttgccgaacagcttcgcctcgcggtagatccggaaaactttgtcggcagggacggaggagatgaattcatcgcgatttttcaaaagactgaccactcgaagatgcgggaaaccttaaaaaagatccgcacacagatggaaaactactccgcaaaacacccggagatgccgatcagctatgcggcagggtacgcaatctccctggactttgccggttccaccctccgggaactgttccggctggcggataaaaacatgtacgtggacaaaaacagggcaaagatcgaagaagcggcacaaaaacagcagaaagcctatgaactgctggaatggatcaaaaaagaaaaataccatttttcggactgtctgtactgtgatgccctgatggatcagtatgagatcctgcggtcaagcaccggatactttctcgcggaagacggtaattattccggggcggtggaacagatcgtggaagaactggcaaccgaccggatgagaaaagaattctgggataccttacagcttacctctctggaacagcagctgacaaaggacaatccccagctggagattccctatcgctacaaaagagagaatgtggttcaccggggaagagtgatcctgagattcctggatgccacagaagatggcagactacaccattttatcctgggtcaggagaacttccgggacagcaggcagcacctgatggatgaaaaacaggaactgatccgctattacgagcagatgaaacagtctattctggaaaacagcaattatgtagacgcattaatggaaactgcggaagcggtgtataccgtagatctgaccaatgactgcctggaaaatgcattctaccatgtgaaacgtgaaagcattattatcgaccgggagatgccatgctcctacgatgcctactgcagagaacggagccggaaggtgacagacgatacgctggaaagctaccggatcatggattcctcggaaaaactgctgaaacgcttccgggaaggggataaacagatcaccgtagagtaccgggaagaaaaacaggatggcaggatgatctggcttcagaagacgatcttgatgtcccgggaactgctgtatgaccgggagaccggaaaagaacgcagtgctgtacatggaattatcctgtttaagaacacttcggaattccataaaaaagaagaagaggaaaaagaacggctgcaaaaagcggtgcaggaggccgatgcagaaagcaaagccaagacagacttcatgaaccgcataagccatgatatccgtacaccgatcaacggcatcatggggatgctggagatccttcggaaaaatgcacacaacccggagaagatggaagaatgtatggataagatgcaggtatctgccgatcatctgctggcgcttgtcaacgatgtactggatatgaacaaactggaaaccaatcagatccaagaagagaatgaaccgtttgaccttgaagtgctgatgcgggaagtggcggtactgatgaatccacttctggaacagaaccagatcacacaccgggtacaccggaaaaatatacagcacacagcactgaaaggaagcccgttacagctgcgccagatcatgctgaacctgttcagcaatgcggtcaaatacaacaaaccgcatggatccgtggataccgacgtggaagaattatcctgtgacggaaaaacagtctggtacgaattcagaatcgcagataccggtatcggcatgagcggggactttgtaaagaatcagctgtttgagccgttcacccaggaacaatacggagccagaacacgctatcagggaaccggacttggaatgtcgatcgtcaaaggtctggtggaaaagatgggcggaaccattcaggtggagagcgtccgtggagagggaaccacatttaccttccgtctgccgttcaccgtcagtgagacagccgcttcagaaacaaacacagtgggagaagatatatcggatctcctccgtgaccgaaggatccttctggtagaggataatgagatcaatatggagatcgcacagttctatctggaagaagcaggggcaaaagtagaaaaagcatggaacggacaggaagcagtagctttgttttccaaaaaacctgccggcagtttcgatgcgatcctgatggatgtgatgatgcctgtgatggacggcatggaagccacacagcgtatccgtgatctgaaacgggaagatgcggcatcgattccgatcattgcgatgactgcacagactacagcagacatccgggaaacctgccgcaaagcaggaatggatgactatatcgcaaaaccgatccgtgaggaagagctggcgaaggtgatcagaaaatcgtggaaagtaaaaaaagtgtaatgctttgcgttgacaaagaagagattactgactaaaataaaatcagcgagaagtcgcttccgggagataccataccggaggcgatttacttttctatgataaaaacgaggagtagatgaggggagggaaccatatggataatcagttaccggaactcaaagtgaatatgttgggaaggttctccataacctatggagaacagccgataaccttcaagagaaactcggcaaccaaagcagtaaaactactgcagattctgttacattccagtctggtggaggaccgcgggagcacaggaatccccagagcacagctgcttgacgatctctttggaagagaagagctggcaaatgtgggcaataacctgcgtgtgacggtattccgtctgcgcaagatgctgatcgaggcgggactgccggaatatgagtatatcgtaaaagaaaaaggtgtcttttactggcgtagcccgatgaaagtggatctggatgtggcacgctttatggaacttgtcagagaaggagaagaagaagtagacgaaaccaggaagatgaatctgtgggagaaggcctgcaggctgtacaaaggagaacttcttccgatgcagtccggagaagactgggtcatcatgaacagcgtccgttacaaagacaaatattccaagatactccgccggctgtgtgcctacagaaaagaacagcacgaatacgacaccattctggaactgacagacaatgccatcgagatctatccgttcgacgaatggcagtccttaaaaattgatgccctgatgggtatgaaccgctacaaagaagcatatcagctgtacgatgcgacttcaaaaatgttctttgaagaactgggaatcacaccatccgagcgcatgatgaaccagttccaggagatgagcgaacggatgggaagaaaataccatgcggcaggagagatcaaggaagacctgaaagaaccggagtacgaagacggtgccttctactgcagcctgccaagcttccgggataactaccggctggtgcgtcggctgatcgagcgaaacggacagtccgcattccttatggtatgctccctgacagacggcaacggccatccgatggaaaaccgggaaaagctggatgtgatgtccatggaactgcaccgggcagtaaaaaacagtctgcgccgcggagattccttttccaaatacagcccgtctcagttcctgatccttctggtcggcaccaaccaggaaaactgtgacattatcttccggcgtatcgccgcacggttcacaaaaaaacatggatcctggaacaaatatctggaatattacgtatcatccatcgcagacgtggagaatccaaatgcaagattaagctttcagaaaaatgaatttcgctggaaataggcaacaggaacaggagtgtgaaacatgagtcaattttggaatggagaagtactggcagcaccgaacctgatcacggtgtgtgtggacgaaagtcaggccagcgagatatccggccgactatatcacggttattcccaggagccacagtcctttgaaaatgtcgtgcagctgatccgttacatggcagacttttacgacagcattcgttttccggaatcctccgtggtccttcgggagttcacttcggaaaagcgtgcgatggaggaactacatgaaaaaagtatggaatatcagcagctgatggaacaaagcggcatctgtgccaccttccacatctttgtcaaataccgccagaacgccacctggcagggcatccttgcatggaaagaaggacatcaggaaatggaattctgcagtgtcctggaactgatcatcgagatggatgccatactgggaagaaaataaaagtacggaaaaaagcaggaactcttaggaaagataaggattcctgctttttactgtacaggcggaaaacatcaaaaagtattacatttcacatccgggtaattcgatcacagatcggaacaaaatgaaagagtaaaaaaaaacgagtttcttctatatataataggagccaccggaccgatctcaaaaaccctgtcataaaccataaattcccacatacaatataagtaatgaggcaaaaactcgtcagagaaacggacgaatccaaggaaatacagcagattccacatatatcaccagcagacggacataattacgccaacagggaacaggatccgcaccgatatcaaaaaacgttacagaatccaacaaaaataaaaaaaacacaaaatatataatgagtgtaatgcttttagtaatggtgagtctattataatacatatataaaaacagagtacagaaggaggtggaacagctgtgagcgattctactaaaaagacggagacctttatcttaaatatttacaacaggcagaatgccacctggcagggttcggtgacctgggtggaaaaaaaagaaaagcagcagttccgcagcgctttagaattattaaaactgatagagagtgctttggatgaagaggagggagaaaaccatgaaaagtagaaataaaaaaagacttctggcattggtgctttgcatggtcgttgccataagcaacagcagcttcatattcgcatccgagaccggacaggccgaatacccacaggaagcggaagtacagactcaggacgaagccgttgccaatgacatggacgtggctgcctacgcagcagatgaaggccaggcagtagccgatgaacaacccgcagccgtggaacaggttgccgcagaaccggccgcagaaccggaaacaaccgccgcagctccggcagcccagccggtagcggaagcacctgcagcagaacagccgacaacagaggcacctgccgcagagacaccggcagcccaggaacctgcagctgtaccgaccgaggagacagctcccgcagcagaaaatgctacggcggaaactcctgaggaagatgcaacacaggcggaagctgaaaaccagcagctcacatggagccaggttgttggaaacacaaccgttaatgtaaccgcagaagcaggagcacttcccgcagacgcacagctttccgtaacagagatcacttcagaagacgaagtaaaggaaatcgaaaaagcagtagaagaaaaagcgatcgaagaacagttttccatcaagaatatcttctcctacgatatcaaattcctggtagacggttccgaagtacagccaaccactccggttcaggtaagtgtagacaccccggagatcacatccagtgaggatgctgcagtactgcatgtggataacaacaatgtagcggaagacatgaacggtgctgttgatggagaaggaaaagtcgtattcgatgctccgcatttttctacatacgttattgtaaataaaggtggtgcagaagtacaaattaaactgcaacattattactatgatacaaataatgaagaaaaaaaattatatgcagaccagaccgttcctttacaggtcggaagtaaaatcgaagattatcggaaatctacgaattatgatgtggttaacgtaaaggaaatcgctgaagacggaacagaaactgaagttcccaatttcaatgaaatctcggtgactggaaataagacgtatcgcatttattataaggaaaatacaagtccgaagcaaggcgctgttaagttttgggactatgctatttcacggggaaatagggatacaaatatcaatagtgactggcattatacaggaaaaaatacaaatgagcgtatgacaatgggtcttaataaagctgacaattataaccaaaatggattagactataatgcatacggtacgaatggattgaatgcgaacaaatgtaattatgggagagataccgatggaaaaggaactttagggttattaaaaggactttcaggtgattatcaaacagttttatggaatgtcgatcagcctggattcttcacagatgattataaaggcgaaggcaagactatttatacagattataaattgaactttaatcgaagcggtaatcattacacacttgcttcagtgcagacaccgaataatgaaacgaaaaatgcgggggcaggtttttggccactcggatatgaaaatttttactttggaatgcgctatgatgtggaatttgaaattggtgattatgttggaccaatggattataagtttactggtgacgacgacttgtgggttttgttagatggaaaagtagttattgatgtcggtggtatccatgacgcattagaaggaagtacagacttgtggaaagacctgggataccctgatggcaaaagacctggacctgatgaaacagcagcaaaaacaaaaaaacatcgaatcactgtactctatatggaacgtggagctggagcatccaactgtcagatggagttcacattaccaaacagccggattttggatgttacagatgtccctaaggctacattatctctgaaaaaggtgaattctaaggatgaagctatttcgggagcaaaattcaaattggttagcaaagcggacgaaaatgattacgttgaagtaacatcggatacgaatggctttgtaacattcaatgatttaaaagaaggtgtagactacacacttacagaagtgagtgtaccaggaaaatatattgcagagactacaatctggacagtaaaactggaaagagattcttccaagactttaaaagcagttctctacaataatgatactaaattagagactgacgctgatggaatatatcacatagttaactataaaccggaagaattagtaaatcagagcgtagagagcaataagacggtttctcttctggactgggatcagagaacatataaaattgatcttacagctagctcaaaagtaacgcagtcaacaaccgtgtctgttccgtttgatattgtaatggtattggatgtatctggtagtatgggggattctttttacgagtatagcaaatatacaggaaaacttaataaaggtggatattattatataaagacatccagtggaatctatgagagaattaaatataaagacaaacagtggaaatactgggatacctacactgatcaatatgtaaaagttactcaaggcagtacagacatatttacaaaagaagaatctgaaacgaaactaacggcattgaaaaatgcagctacgagttttgtagataatgtggcaacaaaaaatccagataatcgtattagtgttgtgacttttgctggatcaagttacataaaccctaatagccaaataaaagaaaataatgatggaaagattttattacgaacaggtaactcaattagcacaattaaatcatggataactggtttagtagcggatggggcaaccaattcggcagcaggtttaggtagtgcggttaacgtatttaattcagagaatagtggaaaatgggaaaatgtcacacaaaatactggaagacaaaaaatggttgttttccttactgatggtgttcctacaacgggaagtacttttaacacagatgtagcggaaaatgcaataaataacgcaacaagattggaacaacagggagctgttatttattctttgggaatctttgattcagcaagctcttccggttacatcagtaatggtactgtaaagcaaattgatgactacatgaagtacgttgcttcatcagatgaaaaatacatgacagcagatagtgtaagcagtttgaatggtttgttcgatagcattacaaacagcatgcccgtatctgtaaaggctacagttacagacgtaattgacagtcgatttgaattgacaaatgcttcgcgtgctacattagtagcagatggtgcaacaatacaggacaacgctgatggctccactacgatcacctgggcaaatactgagattcctgggaaaaaagactccggtacttcagatattgaaagagctggatggcataaagaaattttcatcaaagccaaagatgaatacattggtggaaacgatgttccgacaaacggcgccggttcaggaattaatattgataacaatcatgcagaatttcctcagccaaccgttaacgtaaaagtcgactttaacatcggcaaagatgaaaccgttatctttaaaggagatgaactatcacaatatttcaacaatgacgtagcgaatggaatcacaaagcttgtttcaacgactggatcagagtacacaatgcttggtgatgtaaatgtttcaacaaaatggtataccgatgaagcatgtcggaatgaaacaacaatagaagcaatccgggcagcaaagccaactgcagatactgtttattacgcaaaagtaacagtaactccaaaaacagatggttcagcatcacgtgctaattcagttggtgatgggaatgtaactggaggatactacaaagttgatccggcaggtattgcaaagacgggcacttatactgtaaaagttgtttccggtgcaattcagattgaaaaacagttggaaacagaagcagcaaaagaggaaacatttacttttaaaattgcaagaacagatgtagatggatttactccaatagaagttccgattactatagaggctggaaaaacaaagggaacgctttcaaatgaagataagaagaagttgaaatctcttcctcgtggaacttatgaagtaacagaagttgatacaaatggttacacaattcaggatgtcattgcaacggataacacaaattgttattacaatgttgcagatgacaaagtttccttcacactgggaagtgatagcaagcagaaagatgttatcaaagagaagacttacgagacagcaggaatccttggagtagccgcttttacaaatgaaaaagtaacctcagactggggcatcaaaaaggtaagtgcaagtaataatgagtatatgatttccggtgcagtatttaaattagcaccgaccgcaagtggttcctcactacctacttattacggtaagtctcaggatggtggaacagtaaaatggtatagaaattctgattgtacaactgaaactgagattactgaaacaatccaaaaaggaaggtataccctatcagaaattacagcaccgactggatatgtacgtagtacagaaacttggagtatcgagattgcttcaaaaggagcgttaaaatcaatccaatccggtggtcaggaaattgcagagaataagataaagaaagaaactgtagatggaaaagaggttgtatattacttatatgaaaacgaagtagtttacgatcttccatccaccggacactccggaatcttcaacatcatgatgagtggaatcctgctgatgttcgcaggtattctgatcatatacaagatgaagggcaaggaggtgctgaaaaaataagaaaccttaacatttcagtggcctccaagccacaacaatgatttccagtgcaaataaaagaagagaacggcactgaaaataaaagagaggaaataaaaaagaaaaggagaaaatcatatgagtaaagtgaaaagaattttatcagtgattatggcgatggtaatggtactggcaatgagcgtaccgacattcgcagcaggagaaaacgcaactattacacttaaatgctttgataaagctaataaagttgagtacatgcagattatccaaaaagatggaaccaaaacttctggttgggcatttaccaatggagcaggaaaatgctttacagaagcatttgaacttactgattcagaggatgcacagcagcaggttatctggggattaatcaagtataacgataactctgttaaattgccaacaggcgtaacagcagtaacagcaacagcagcaaagattgacttagcattaagtaaagttgcagcacttaccggattcactgtagcaaaaaataaagaaagcattgaagtaaatgcagctggtgtttatgcaatcaaagcagaagaaacaggatttacttataaaacagcaacagcatatgtaggatttggagaaccatatccaacattaacaggtgcagaagtaacagctaaaaagtctccaacatctgtagacaaaatagtagcagataatgatcatgtagtagcaattggagatatcgtaacttatacaatcgaagcatatgtaccatttattgatgcggctaatacagataatagaacatttacaatcactgataaaattaccggtgcagattactacttagctggtccaaactctgttaacaatgttacaatggtaggcaaagatggccaggttggtacaatcgtagtaaatgaagatggtaaaggatttactattgatttaagagaattagttgcagatacatctaatccaaatgcaggaaagaaaattacagttacttatactgcaaaagtaaaagaattaacagtagagaatacagcaggtagccatacagcagacgcaacatacggcggaaataatgtaccagttaaattattcactggagaaattactttattaaaatatggtgatagtgatgaagcaaacgtattaaaagatgctgaatttgaagtatctaaagatgaagcagctacaccattaaaattcaaacggcaagaaaatggaaattatagatatgctccagatgcagaagatgctagtacagttgttaaaacaaatgcagaaggtaaaatcgttgtagaaggtttaaatgttggtacttatcactttaaagaaacaaaagcaccggaaggatattccattaatacagacggtaaagacattacgcttactcagactggcgtagctacagctattgttaaagcttctggcaagttgaatgataccaaacttaacgctctgccatccaccggtggtatcggtacaacaatcttcacaatcggcggttgcgctatcatgatcgtagcagctggtctgttcttcgcaacaagaagaaaaactcagaaataatgaacaataaggaaccccgtacactctcaggaggaacggaagaacccatgaaaacggggcggctcgcccgccccgtttttgataaaaaagcattacaagacagcatacagatatagcattagagttgaaacaagatacaacagtaaggagagcccggatgaagaaaaaaatatcaattgtattagcaggaattttgtttttagccggtttgtccttgttgctgtatccgctggtggcaaaccagtggaataactacagacagagccgactgatctcggaatatgaatctgtagtaaaagacgaatcaaggaaaggaaccatcaattatgaaaaggaatgggagcgggccaatgcgtataaccagtctcttcttccaagcatccttcccgattctttcgctatcgcagcagcatccgataagcccggtgaggaatatatgtcctgtctgaacatcctgacagatgagatgatgggatatgtggaagtgccgaagatcaatatcaagatcccgatcttccacaccacttcagaagaagtgctcagtaaaggagccggtcatctggaaggaagttcccttccggtaggtggagagaatacccattcggtaatctctgcacaccgtggtcttccaagtgccagtcttttcacagacctggatcagctggaagacggagatcattttctgatccgtgtactggatcagacactttgctacgaagtggatcagatccatatcgtggaaccggagaataccagtgatctggcagtggagccgggacaggatctggtaacgcttctgacctgtactccatatgcggtcaacacgaaacgtcttctggtaagagggcatcgcgtaccgtatgaggaagaggcaatcgagaaggaagagaaagaatctccgatgagtctctataccaactatctgttatgggtagtggtagggcttgcagtaaccgcagtgctgatcatattcttatggcagtacgacaaacggtataagagaaaaatgaaagaaaaacaggcagcagcaggtggggcaccaaaagatgcctttgaccggaaagaggaagagagatgagaagaaaattatcgggaattctctttggtctgctgtttctggtaggatttgggatccttgcctaccccacggtatccaatcagtggaatacgtaccggcagagcaggctgatcagtaattatgaacaggcggtcagcgatatgcagccggaggattacacgaaagagtgggaagcggcgagagagttcgacagtactctggtacagaataatatatatggtgatgtgttcggcagtgatgatgtggatatgaaggacacagactactggaaggttctgaatgtggcaggtgatggtgtgatggggtatctttccatcccgaagatcaatatcaagcttgccatctaccacggaaccgcggaggatgttttgcagacggggatcggtcatatgaacggcacatcccttcccatcggcggagagagtacccacagtgtacttgccgctcacagaggtcttccggcagccagattatttacggatattgaccagttgaagcagggggatatgttttatatccatgtactggatgagacgatggcatatcaggtagaccagattctggatatggtagataaagatgatcacgagacactggaggaggcactgcagattcaggagggggaagatcaggtgaccttattcacctgtactccatatggtgtcaattcccaccggcttctggtccggggaacgagagttccgtataacggcgaggaggaagtggagagtacaccggtggacagcatgttacgtgccatccagaattattatatgttatacttaatcttaggattagcagtgacactgcttgtgatactgatcatgaagttcctgtttgaccggaagaataagaaacgctccggtaagacggatgatatgtcgaaggagggatagaggtgactatgaaaaagagaataaaaaccgcaggggcgctgacccttgcagcaataactgttttatcagcagccggtttatccagtgtatatggtgctctcggagtagagacagataagaagtgttctcttacatttacattggacggcacggagttcgatgaacttcgtagcctggatattccggtggatgtgtacaaggtagcggacattacagaagaagcagtgtatgacactgcaaagtatacagattttgctgatctgggactggaaaaagtaagcagtactaccaccgcagaggaatgggcacagatggcagaggatgccatgaagattgtagaggataagaaaattgcaccaaccgcagatgtaaaagttaccaaaccggcaggtgcaacggaatctaccggtgtgatcaatgatctggatacaggtatgtatctggtgcaggccgaaatcgtacagactaatgaatacacctatgattttaccccgtacctggtatctcttccgaataactattattccaaagagaaaccggacgatacctgggtatacgatgtgacaaccggtatgaaaccgcagcagacacagcgttacggtgatctggagattgtcaaggatctgacagagtacaatgcttcccttaaggatgcactcttcgtcttccaggtagaaggcaccagaaacggtgagcaggtctatagcgatgtagtttctattaagttcaaccaggcaggtgaaaaatcagttctggtgaaagatcttccggcaggaacaaaagttactgtaaaagaagtgtatgcaggcggaagctacagcaacacttccggtgacacacaggaaacagtgattgttgccgagggtgttacagataatccggcaagcgtcagctttaccaatacttacaacggaaagctgattccgggaaccggtattgtgaaccattttgagaataaggatggcgagtggagctgggtacagcagacagatgaacccgccagtgccaattagggaaaggggtgcaggatatgagaaaattaagtaaaaaaagtctttgccttgcagccgcagccctgacactgacagcggggatcagcgcaggaacagcgatggcgtattttaccacgtatgcggaggcttccggtaatgtaaccctgaatatgggatttacggagacaaagcctacagaggaattcagtaactggaccaaacatgtgaccgtgaagaataccggtgattttgcttgttttgtccgtgtaaaagcactggcaggagaaaaatatcaggatggcctgcagtacagtgattccgatggaaagtggacaccgggagaggaaggctattattattacagtgagccggtcgctccgggagagagcagttcggttctggatattaagatcgacagcaaggatacagaagacagttttaatgtagtcgtcgttcaggaatccacaaaggttttatataatgaaaagaacgaaccgtacgcagactggacacagatcgctgataccagcgagacagccggagaataggagggtgagagatgagtaagaaaaagagaatgccccttgggggactgaccgtggctcttctttccgcttctgtggtattgctggcaggaagtacggtgggaagtgccagagcggcattgacttattacagtgagaactatggtgcacaggtagaggtttccaatatcggtgtcagcctggtggaaaatgacaaggtgatcagcaagagagattacgcatccaacggaaaatgggatgaggcaacaggtgatctgctgacaggcctgaaagaagaaaagatcgtaccgggaaaacagtacgaggaagcgatcaaggtgacaaacagtggttccatcgacagttatgtccgtgtgatcctgaagaagagctggacgaataaagagggtgtgaaagataccactctttccccggatctgatcgatctgaatctgaaagagggaagtggctgggtaatcgataagaatgcatctacaaaagagagaactattctttattatacaggcattcttccggcaggagaaagcacaccggcactcagtgatacgctgaccatcgatggcagcatcgctaccaaggtaaaacaggatgtcacagaaaaagacggttataaaaccatcaccacaacctatgcatacgatggttataatttccagcttgaagccgaagcagatgcagtgcagacgcacaacgcacaggatgccatcaagagtgcctggggtgtggatgtagacgtagacggcaatggcaatatcagcttacgataggagggtgcagaatatgaaaaagaaaattttgtgccttgccatggcagcaatcatggccgtaggcatacatacaacagcatttgcagagacactgcagggcggttctgactggaaggtagaattcaacggttccaagatgagcagtaattttacttccgcagacatgaagaaagatatcttccagttacagccgggagataccatggaacttcaggtaggactgaagaacaccagtgagaaagatgcagactggtatatgaccaacgaagtattaaaatctctggaagacagccagagcatcgcagagggcggcgcatatggttataagctgacttatgtgggaccggataagaaggaaaccgtattatatgacagcgaaaccgtaggcggcgaggatgcccagaagggtgaaggccttcaccaggctaccgatgcactggagaagtatctgtatctggatcgtctctccaaaggcgatgtagcttctgtccatctgacagtaaagctggacggtgagacacagggtaatgattatcaggatacactggcaagcctccagatgagcttcgcagccgatccggtgacggtaacaaccgtgacgaagaagggcgaagacaaagttgtcaataagacagtgaccaagacagtgcagacaccgacaaagaatgttgtgagatccccgaaaacaggtgatactactcagatccttgccatcagtgcggtagcgctggcaagcggtgtgattcttctgattctggcagtggtactgattaagaagcgaaaagaggagaaaggagagggtcagagatgaaaaaaatgtataagatagccacagttcttctggccttttgttttctgcttggatcggttcctatgagtgttaaggcagaggattataagtatcaggtaacgatattcagcggtaagcagggatctttttccggaactgcaggtctggtagtaaagggagcagactacagtgtttccaatactgcagatgctatcgtgatcaaagatctgaatcccggagataccgtaagttttgaagcaagatccggtgcagtggcgctggataaggacagcaagtattatgtgcagggtatccgtatcagtggacgtgataataatgctgcagtagagaattcttcttttgaagtaaccggagaccaggaatacgtagtagcatacggaatcaaaggcgatcaggtagcctacaccatcaattaccaggatgccaacggcaacaagctggcagacagccagaccttctatggtaatgtaggtgacaaaccggtggttgcatatacctatatcgatggttacacaccggagtacagaaacctgaccaagaccttatctgccaatgcagcagagaacgtatttacctttaattacctgccatatgagactgtaaccgtgacaacaccgggacagaccatcaccaacaccaccgagcagacagttaccgtaccgggaggtacaacaactacaaccggtggtactaccggaactaccggtggaactacaggcacaaccggtggcacaggaaccaatgccaatggcggtaacgcagcaggcacaaccaccggaaacggtgatgcacagggcacagatgccacaggtggaaccggcaatggcggaccgggcaatgtaacagataatcagggaacagaaggcacagaaaacggcggaaccacccaggatgcacagggtaacgaagacaccaccaccatcggtgatgaagatacaccaaaagcagaccaggatctgaaagatctggacgatgaggatgtaccgaagagtgacaaagacctggatggcaacaagaaagtaaagaagagccttcctctggtagccggcgttggtatcggcgtagcagcacttgcagcactggcagcaggtattgtgatcgtcagaaaacgtgtacacagataatcaggcagtggaaagaacagtgaaactgctgtatggagtaaaaacaaaactccatacagcagtttttttgttgtccacacaaatcaaagtcgcgaagggtattctattttgcataaaataacatataaagaagatttgctttccttcacgtaatgtattataatatgcatgtatatttcacggaaggaacgaaaatcatattttccgtgaaaatgtaatacaactcagggaagtggttgtttcaggaggatgtaaacagaagtatgcaaacatgtggaacgtatatgaagaacaaaaaattgaagaaccaacaggttttgtatgtaaaaatgttcggtgatttttccctgaaatatcaggggagatctttgatcgcaaagaagaaaaaagagacgcagtttgcactggtattgcagttgattttccatagcggagaagaggggatcagccgggaacatctggagaaggttttgtttggtgaacggacattggacgatgcgaatcatgcgatccacagcctgatttataatatcagaaagaagctggagcagacagggcttccgaaaggaaaatatattatttccagaaggggaagattttactgggacaaagagattccgtttgaagaggatgcgcagttgtttgaagagtactgcagcagagcatgcagggcaggggactgggaggaacggattgagctgtgctggaaagctgccttgctgtataaaggtgcttttcttaaggactctgagcaggaaggctgggtaaaagaggaacgagagcgttaccatatcatgttccggaagctgatagaatatatggcagagcttctgcggaaaaagaaggcatatattcagctggagaagctgggcaggcatgtatcgaaagcagcgccatatgaagaaggggaactgctggtgatcgaggcactgaccggtatgggaagaacggaacaggtagagattctgtatgtggaaaccgtggaaaagtatcgtcaggtctatatggaagaagaactgtgcaaattaaagaatttccggagaaaaatcgaagaacagcttgaccatccgtatgatatactggataatatacaggagaatatggcagaacagctggaaaaggtacaggagccatatcagtgtaactggatggtgttccgggagatttatcatatggttgcacgtatgatagagcgaagcggacaacaggtgcagctgatgttatgtacagtaacggatatggagaaagatcctatccgattcgatgaatgtgcagaggtactgtcacggtatatatgggaaagtatatgcagaagtattcgtgcgggagacgtagttacccgttacgggaagggacagtatctggtgcttctgatcaatacaaaaccggaggattgtcaggagatccagaaacgcatcgatgcacagttccggaagaaagataccgtgtatgagatccggtacagcgtgaagtctgtcagaagtctgaataatgcaaaggatgatcagagcctgtcataaggtgtttttcgggcaggcatcggttctggtacaggatatgggaaaaaagaagaaagaaaaaagaggggcactggcaggatgtgcccgggtctgtaagatattcggaacggtctgtctggtggcagtgattcttgtatgtctgccattaacccttccgcgggtcttcggatatgagatctatacagtcatcagtggaagtatggagccggcgataccggtgggaagtctggtctatgtacagccgggagcaccggaggatgccgagacagatgatgtgatcgcattccacagttctatggatacgggagcgatcatcacacacagggttatcaaaaatgatatagtaaccggtcagatccacaccaagggtgatgcaaatgaaaaagaggatctgtatccggtgggctatgattattacatgggaaaggtagtgtattctgttcctgtgctgggacgggtacttgcatttttcgtgacatttcatggtaagatcgcagcgggaagtctgatcggacttgcgattctgttacagatcatcggtggagtgatggaatcggctgccgagaagaaacgggaatagatatcgcagaaatagctttgcgatgtcggcagaaaatagtataataacagtagctgtgaaagatgagacagttactgagaaaagaaggtaaccggggcagcagcctgcagttaccttctgtgttatagaaagaaggagagatacgatgggatttaaaaaagttgatgtgaaaacactggagatgaaaccttttgagaagatcggttccgaatggatgctgatctctgcagcaaaagacggcaaagccaatacaatgaccgcttcctggggcggcatcggcgttctgtggggcaagaatgtggcaacagtatatatccgcccgcagcgtcacaccaaagaattcgtagatgcaggtgatacatttaccatcagtttcttcggtggcgagcacatgaaagagctgggctacctcggcaaagtctccggcaaagatgtcccggacaagatcgaacagtccggtctgcatctgacagaagtagacggtcagccgggattcgaagaggctacacaggtgctggtatgcaaaaagctttaccatgacgagatcaaaccggaaaacttctatgaaacggaagaagatgaaagatggtatccggaaaaagattatcataccatgtacatcgctgagatccgggagtgctgggtgagagagtaaagcagaaagtacaaaagaagagtcggaatcctgaaaggtaagacaggtttccgacttttttgcatggaaggtgaggcaggattggctgtttctggttgcggaagtaaggaaaagagacatataatagatgttgcaggaaaggtttacatgcagaaaaaggagacaatcgtatgctgaatattttttatggtgatatgaaagaagctgtgtataatacggcagcttattttaaatatgattacgaggacagctggatcatagatccgtttgtgaaagaaatggttcaggatgtcgatcggtcgacggtcttagacagtggagtcatcgacagcccggtccttgggaagataccaccaacaggactatccggtggagtgaaaacactgattcttgttaaatttgaaaaagataagatttttaatgcttcgacatgcggtgacaattgcgcaaaatggttgttgaaaattgctgcatcagaggatcgcacaattaatctgcatcatttgatggaatttggggaagaaccatttcagatccgtattctgaatacggatcaggtggtgtgttccatgagagaactgatatcgatagccggtgaatttgtctgacaggagatagggagaatgaagggaaaacataaaattgttgtttcaacaaaacgcttaaaatatgagtttgaactgcaccgcaatctgactatcattcgtggagacagtgcaaccggaaaaaccacgctggtagatatggtccgggatcatatcaataacccgtcaggcacaccggtggagctggtttgtgataaaacatgctatgtgctggagggaaacttatggaaagcacagttatcggagatttcagatggtatcgtattcatagatgaaggaaatgaatttattaaaacagaagagttcgcgggaactattcagaaaacagataattattatgtaattgtaacaagggaatctttacctgcactaccatacagtgcagaggaaatttatggtatccgaacatctggaaaatatgagatgttgaaacagagttatcatgagttttacagaatatatggaacagatacctgtactaacccggtaaaaccggagatggttctcacagaggacagtaattcgggttatcagtttttttctcacatatgccaggcgaatgggttgaaatgcgagtctatgaatggaaaatcgaatgttttccactatatcaatgaacataaagatcagaaaatccttgtaatagcagacggtgcggcgttcggctcggaaattgacagagtattgaaactgatccgggaaaatgaaacagcagctctgtatctgccggaatcctttgaatggttgattttaaagtctggggtattgaaaaataatcagatagaccagatattggatgagccggcagaatatatagaaagcagagattatttcagttgggaacggtttttcacatctgtgttaattgagaacaccagggatagttatctggcatatgcaaaaaagaaactgaacacagcgtatcttggtggaacggtggaggatgcaattcttagacagatggagaagatagaattggggtggaagaaagaattaaccaacattttactcgaagaagattgtgaaattaatcattctcatatataataaattatataatgtgtcgtggaaaaagataattttcagaaaatgtatatggggatggaggacactgtatgaagaagagaagaatattccgcaatctgaacgacaaagagttcgcctgggtgctttatgatgtagggaattcggcgtatacgatgctggcgtgtgcgctgatacctatctggtttaaggcgatggcgatagggacaaagccggggcagctgacgtcggatcgggcaacggcttattattcgatggcgattgcggtgatcacgatcgtggttgcgttgctgggtccggtgtgtggggcgatttctgattataaaggcatgaagaagatcttttttaccagtaccgttgcagtgggtgtctgtgggtgcatcctgaatggatttgcctgtcagtggatcgtatttttgctcctgtttgcagcaaccaagatcttttacaatatgtcgctgatgttttatgactcgatgttaaacgatatcaccacggaagagcggatggacgaagtttcttcttatggttatgcatggggatatcttggatcgtgtattccgtttctgatcgcgctggtggcttatgtactcggaccggatatggcgggtatcatttccggtaagttatccatggcgatcgggtttgcggttacggggctctggtggcttctggtgacggttccgctgataaagaattataaacagatcaattacgtggaaaagaaagaacacgcagtgggaagtgcgttccgcagaatctttgccaccatcaggtttatcgcaacaaaagataaaaaagtatttttctttctgatcgcattcttcctctatatcgatggggtgggaacgattattgataactgtatcaatatcggaaccgatctgaacctgagcactgtgggacaggtgatctgtctgctggcgacacaggttgttgcctttggcggttcactggtatttgcaaaattgtcgaagaagtacgataccgtacagctgatcctggtatgcattgcagggtattttatcgtctgcctgtatgcgctgaccttaaagaacctgataggtttcagttttctggcattcggtgtgggatgcttccagggatccatccagtccctgtcgagatcgtacttttccaagatcattccaccggataactcgggagaatattttggtctgtatgatattttttcaaaaggagcatcgttccttggatcggctgtgatcgcaggaataaaactggctggagggaccattaatattgcagtggcatcacaggcaatctttttcttcctcggattcatcttcctgaagatcgcagatggaaaagagcggagaatcgtggaaagtaaataaagaatatcagaaggaaatgcgggaataaaaaagctaattacatattgcagctataaacagcaggagtctgaggatcagtagaaggattctcaggctcctgttatttgtgcaaggtaagtgcggctctgtgcataatagaaagatgattttcatacagtcagggaagaaatgtgataagataaaaagtaactattcaatagataactgtgagggtactgaacagttgcgataaaaaagaaatcagagagggatattttccggagttttccgtctaatctatgtaaacaaaaaaagccggccggcaaaccaaccagaaaaggtggtgcaaaagtgacaaaagaacaattaggaaccttgatcctggattccgagaggcagatgtattccactgcaaaatccatgttatacagcgatcaggactgtgcggatgccatacaggagacgattgtaaaggcattttccggagtgcatacactgcgaaatgacaaatatgcaaaaacatggctgatacggatcctgatcaatgagtgttataccatcctgagaaagacaagtaaggtgatttctctggacgagatgtgcgagacgacggagcttgcagcggatgaaaagagtgactacagcgatctgtacaaagcagtaggttctctgaaagaagatctgcggatgccggtgattctgtattatattgagaattttaacatcagagagattgcgcagattatggatatcagcgaaggagccgtacagaagagactggccagagcaagaggaaaattacgacaggatctgcaggaaagtgaggcgtggacatgagattagaagagatgaaaaacaatatcccggaaactcccgattttattcataagatggtacaggaagaagtcagcagacagctgcaggacaccaaagtggtacccatgaagaaaagaaaatggaacaaagtgcaggcagccgccgcagccgccctgtgtctgcttgctacttccacagtggcgtatgccggcaacagactgtaccatatgtatgtggaaaaacagggaaattaccgtgtggagacagggattcaggcagatgccggaacatccgtgcagctcccggaacagattcatgatgtggcaatctcaacgaactatattccggatggcatgacatggacagatgaagatcatctgcaatatacagcacaaaacggtggctttacatttagttctgtactgcttgacagtgatgattttgagaaagcaaaagaagataaaaatatcgtagagagtgaggaacatacttttggcaagtacgaaggtgtctatctgagatatcatgaagtgatacaggacggcttctttaaccagcgtatctacctgttttgtccagaagaataccgtgtgatcaccatctatgtgggcgatgatgtatccaaagaggacgccctgaaggtagcagataatcttcagatcacagaaaaagataccatgatagaaactgccggtatgtatacctggagtgatattgtctcaccggaagaggtacagggggacgaagctgtaaccagtatatctgctgaccggcttccggttgccgaagtcggagagaaagttgatctgacagccagcggtgaagataaagatggaaattacgcagacaatattccgatacaggcaacggtagattctgttcagatcacagatgaccttcagcttctgaacggccagattccagaggaatgggaagatgctgtcggagaagacggaaaattaaaagaaaacacaatctcctacatccgggaaggagacggagttaatacgttggatgaagtcgtaaaaacaaagaccgaacagcaaaaactggtatatactaccgtcacatacaccaatacatcagaccaggaagcagaccatatactctaccttggttccctgatgatgtgccacaacgatggaagtacatacaaagtgtatacaccgtgcgaagaagccggagacggttacgatcgctgcacctgggacggagcagcccgaaccggtgaaatgaaatactgcagtgtaaccgagaactatggtaatggcggaaactatatcccgtccctcaaaccgggcgaaagcatccagatatccatggcatggatcgtcaacgaaagcgacctgaaagaaatgtacctgaacctcaacggcacaggcgcctcctaccagttcgatgacgaaatccttgcaaacggcattatcgacatccgtcagaactagtacgtcgttttcgaaataactgtatcattcacttgtctacgaatccgattgcacagtttaaaaagcctcagcgtagcccgctacgcctacgttttttgaactgcacactcgaatccgtatcctgcgtgaatgatacagttatttacgaaacgatgtactagagcgtgtttgaaaaaggcttttcgtgagctgcgagtcccagtttgcggtatatgttaccctcattcggataaaatcccccacaaactgggactcgcagacaagtgtataagcgatacataaaaaatcaggagaacaggagttcataaccctctgttctcctgattgtctatgtgcctggtaccccagaaaaacacaataattgcctgcaatatccgaaactcaacctatccacactatacatacctgccgctttccaatacccagaaacaatgcccctgccccggagcgtgagacagccttttgccggcgcctttagcaaatatgagatccagcatttacgcaggctttcgcgagggtccgctgaccctcgtgaacatagccgaagttaatgcttagctcagatttgcgttgccggcggttgtctcacgctccggggcaggggcattgtttcgtccgtgtcggttggcaataaggctgagcaagagaaatatctcacattccggggcagggggcactgtttcgtccgcgtcggttgcaatgtgctgagcaagagaaatatctcacatttcggggcagggacattgttttatccgcatttgactatgatttcacgccaccaacaatattccacccctaaaatgaataacatcccccacccccgtcaatcctctaaaaaaaacaaaaggagccataaaaaatgaaacaccaatcccacgcaaccctaacagccctcctgttcctctcattacttctcgtgacagaatccccccgctatctccaagaaaagtccacttccacccttcagcaacaaatcgcaacacaagtgctgcgctttcacataagagccaacagtgataccgttgccgatcagcaaaaaaaactctggataaaacaatccctcctggaatggctgacacccatcctatccgaaaacaccagtaaatcagaaaccatacagtgcatcaggaaaaatctcccggacatccgaaaagaagccacccgtatggccgccccggaaccagtcaccgtaactcttcagaaagaatggttccctgaaaaaacctatggaacctgtactttcccggaaggaatctatgatgcccttcgcgtagatatcggacaggcaaaaggccataactggtggtgcgtcctctacccctccctgtgttttgcggatgcgctggagccttccatgaccgaagaaggcgaagaaaaactgcaacaggtactcgatgaagatgcttatgacctccttctgcatccacagaagctgaaaatccggtttagacttgaattcttcttacgaaacaggtagaatatgataagtatgtaagcagtgacagaagaaaaatgtaactgtaaaaacaggaaacctgaatgggagaagagacatgaaaacagatcgtaacgcaccgataggtgtatttgattccggtgtcggcgggctcacggtagccagagaaatcatgagaaacctgcccatggaaaaaatcgtatacttcggagataccgcccgcgttccttatggaagcaaatccaaagaaaccgttattcggtactctagacagatcgtccgattcctgcaaaaacagggcgtaaaagcaattgtgatcgcctgcaatacagcaagtgcgctggcacttgatacccttgaaaaagaaattgatatcccgatcatcggtgtggtaaaaccgggagccagggtagcggcaagagagactacaaaaaaaagagttggtgttatcgcaaccgaagcgaccatcaacagccacctgtacagagaactgatccagcagattgatcctgaaatcacggtagtcggaaaaccctgcccgttattcgtgccactggtagaagagggctggcgaaaagatccggtcacagagatcgtggcccgcagatacctgaaagagatgcaggacgaaaaagtagacaccctgatccttggctgtacccattacccactactccgcggggtgatcggatctattatgggtgatcaggtacagctggtaaacccggcatacgaaacctcactggcattaaaacaattactgatcgaacaggacctgctgaatcagggatcggtagaagaagaatttccataccgtttctatgtaagtgatgcggcagaaaagttcaaaagctttgccaactccattctcccctatgatgtggagatgacaaaacaggtaaatctggaggaataaaaagatgacaaaagaagtattgatccatctgaaaggtatgcagaccacggatgacccccatggttctgatgaacctctggagctgatcactgtcggagaatattattaccggaacaatacccactatctgttgtatgaggaacagatggaaggacttgacgaaccgatacataacctggtcaagatccgtcccggtcatatggaagtgcgaaaaaaaggaccggtacagaccaatatggtctttgagacagaaaaacagaacatggcctgctatcagacaccatatggtccgatccagatggatatcacaacgaccggagtaaatttaggggaagaagaggaacttctggagataaagacagaatatgtcctggggatgaatggtcagaaagtagcggactgtcagatgcatatccgtgtaaccccgaagggcagcaaagagactacatttttcagagcataatcaaaattgggccaccggaccaattattgattgatatgcaatgcaacaaaaaacggagcttatcatccatcactggaaaataagctccgtttttgagttttatttgtctttttttgcgattttgtttttcattctccggaagaacttttccttctgttttggctgttccagaggacctctgacaccgcggacatctgtgatatagataccactgattgtagctttcacttcttttttcaatgggatcagatcaaaaatcttctcgtcagcaaccatcgtcataattctcggaccgatctttgcttttacgatgggaagttttgttctgcgcatcagcttcggcgtctgatcaattaccatctgcgggagtccagattctttgatccgaagtctcttcttatcaatgatcagcatattgacggtctgttttgcagcctcaatctgtgcctgattttcctcctgctttttctgtgcacgtttgccaagaaaataaaggacaaccagtacggcaatcaaaatcactaaaataattaataatacctgccagactttcatacttttcctcctgtcctgtgatacaagcacgaatccatcattccatgcctgtctattttatcactgatatgggcaaaaggcaatcagaatcggggaaaatctcaggaaaatccgattttgctatggctttcaaacggattcatgctataatatctgataggtgtcagcatttttttaaagagataagaactgacctggatggagaaataaccggatggaatcagggaaccacagagaccgccggaagaaccatacaaaagtctaaataaaggagtaaaaaaatgagtcaggaacaaaagaaaagaccacccatgacggaagaagaaagacagaggcgaatcgaacggcttcggagagaacgcagaagaaaaagacgtcagcaggcgatgatcatgcgtgccgcagttcttggtgtgctgatcctgatcctgatcggatccatcgcactggtatctgctcaagtgcgccgttcaaaagcaaaaaaagcggaagaaaaagcgaaacaggagaaactgatccaggaggaagaggcaaaaaacaaacagcgtaaggaatccatcgatcaggcagatgttatggcacagggatatgattatgacggtgcgattgaactgttaaaatctctggataattatgacaaagatgcggatatcgtggcgaagatcgcaggctatgaagcggacaaatctacgctggtagcggtgaacatgaacgagatcactcatattttctatcattcactggttgtagatccggagcggggttttgccggcaatgacagtgcagcagccggattcaagcagtggatgacaacggtagacgaatttaacaaaatcacacaggcgatgtatgacaatggctatgtgctgatcgatcttcatgatatggtaacagagacgacagatgagaacggaacggttcattttaccacgaatcaaattatgcttccggaaggaaaaaaaccgtttgtattatcgctggatgacctgtcttactatcacagttatgacggtcgcggtgtcgcttcaaaaatagtactggacgagaacgggaaaccgacctgtgagtatatccaggctgacggaactaccgtaaccggtgcatacgactgtattcctctgctggatcagtttctggaagaacatccggacggtgcataccatggagcaaggggaacgatcgcactgacaggatacaatggtattctgggatatcgtaccgatattgcttataagacaagagagaatctgacagcagatcagcaggcatggctggatgcccatccggattttgattatgacaaagaatgtgaagaagcaaaaaaagtagcagatgctatcaaagcagacggatggaagttcgccagtcatacctggggacatatccggatcggtgatgcaagtcttgagagtatccagaaagatacagagaaatggctcagttatgtagcaccgttagtcggcggcacagatacgattatttttgctcatggacaggatcttgcagactggcatgattattccagtgataatgaaaagttcacatatctgaagagccagggatttaatttcttctgcaatgtggattcttcacagtatttcttacagatccgtgataattatgtgcgtcagggaagacgaaacctggatggttaccgtctgtggaacgatgtccacggagagaaaaatcgaaccagtgatctgtttgatgcgacacagattctggatccggcacgtacggatatgccgccattataaaaggatacaaggataagatgaacggtgcgggaatgaaaccgttacatatagggaaagaacatggatgatacaacacgacagaaagtagaagaatcgcctgaggagcgcaaacgccggatacgcagacagcgtatgattcaggaacggcgccgcagacgtcggagaaaagcactgattctgaggggaatccttgtgttgatctttgtactgatacttgtggggatcggctccgccgtttcctgcggagtaaaaaagtacaggcagtcagcagccgggaaaaaagattcaaaaaaacaggaaacccaggtgacagaagaaactgtgcagatggaagcggtggatcttaagaaggttctccatctgtctttcgaaagtctgatcgcggataccggtcaggctttcggacaggaagacagcagtgccgcagcgacactggatcagacccgcgtgacggtggatgagttcaacgccatgctggggcagttgtatgaagaaggatatgtgctggtgcggttttctgatcttgcagcggtcaatgaagatggtgcgatggaggccaaaaagctgatgctgccatccgggaaaaaaccgttgctgttatcagagacgaatgtgaattatgatctgggactgtccggacagggtctggcatccaggctggtactggatggcaacggagcacttacctgtgaacgtcaggcttcagatggcagtactgtgacaggagcctttgatgtggttccgtgtgtggaggcatttattcaggaacacccggacttttccagtaatggagccagagggatcctgggacttaccggatataacggaattcttggttatcggacggatgatgctctggcaacatcaacggataaccgttatgcggcgaaatatggagtatttgatacagcagcagaaaaagaggcggcagcgcctgtgatcgaagctctgaaaagtgccggatgggaatttgcctgtaatggatatgatggaaccaattatggcagtgatgaagaggccgtatctgcggatcttacaaaatggaacgaaagtgtgggaacacttgtgggaaacaccacgattctgttgtttccgtccggtacagacagccgtggatggaaagcatatgatgagtcggatccggtatatcagatactgaaaaaacagggatttctgtattatggcagcatggatatcagcggaacaaaaacacagttgacggagcagtatctccgatgtagctatatgaatgtggatggttaccggatgtatcaggatctgtataaggatgccgggcgttttacggggattctggattttcaggaaatctatgacagcaaacgaccgatggcagcgaatgaaacagatacacaggctacaggcggagaagatgaaaaagtctgaaaaaaatgtgaaatctggcagatatacttttcatttaaagaaaaatatgatataaacaaaaggtattgtgcctgttaatgggatgaaaatggaggatttatgaagaaaagagcgataatgatcagcatgcttctggtaatggcactttccgtaaccggatgcagtcagaagacagctacaaaagataaggatacaaaaacagaagagacagccaagacagatgacgcgaaagagacagagtccgacaacacggaggatacttccgaagatacaccaacaaccgcagagctgatggcaggtatcgatgtagaaaaatgtgtgacactcggtgactataaaggtgtgaccgtagaaaagaccatccagtctgtaacggacgaagatgtacagaatgagatcgataacgcgctggcaaactatccggtggaagtagaccaggctgcaaaagaaggtgacacagtaaatatcgactatgtaggtaagatcgacggagaagaatttgacggaggaagtgatcagggagcagatctgaaactgggttccggaaagttcatcgatggttttgaagacggattgatcggtgcaagaaaaggagagacccgtacactgaatctgactttcccggaagattatacacaggatcttgccggaaaagctgtagaatttaccgttacagtcaatgcggtgaaagagccgttaagcgagcctacggatcagtgggtggcagacaatatcgaaggatatgacaatatagcagactacaaagcaggtatccgttcagaacaggaagagagcaatgaacagacagcagagaatcaggttcgttatgccgcatggacacaggtgatcgacaattgtaccatcaatgaatatccggagacactggttgaagtcggaaaaaaactgtatgaacagcaggtggagacttatgcaaagtatgcaggaatggaactggatgcttatattgagtcctccggactgacacaggaagaatatcagtccaatatggaagagtacggtaagaacgtagcagcgcaggcgctggtatgccaggcaatctgtgacaaagaaggatttgccatcggtgatgacgattatcagaaagctctgcaggatatgctgacagaatatggatgtaccgaagatgaactgatccagacttatggtcaggataatgtagaacagagcatcatgctgaaccgtgtcagtaatctgatcctggaaaatgcaaatgtgacagaagtgcaggctgacagcagtgcggacagctcctcagatgacagtgggaactaacgttttgcattaagaataagaatagattacagaaaaagagagaaagcccggttgctttttctcttttttgcatatgcatatcaataatcgggccgctgaactgattttgatgatatcccgggcttgaagtaaatgtcgattcgaggtaaaataagacacagcgataattatatatacaggaggagaagacaatggaattagcagtattacaaaaagacatggtgacagctatgaaagcgaaagacaaagtaagaaaagaggctatttcttctttgatttccgcagtaaaaaaagtagcgatcgatgaaggtcacagagatgatataaaaccggaactggtagatcaggtaattttaaaagaactgaaaacagtaaaagaacagatcgacacctgccctgcagaacgtaccgatctgatcgaagagtaccggactcgttacaatattattaatgaatatgctccgcagctgatgtctgcagaagaggtgaaaatctgtctgcaggaaaaatttgcagaggttctggcaacgaaaaataaaggacagatcatgaaagctgtcatgggagaactgaaaggcaaagctgacggtaaggttattaaccaggtagtgggggaactgtgtaaataaccgaataaagcgggaggatttgttattatgggaaaatttaagattgaaatgggcgatattaccacctatgcggtagacggaattgtgaatgctgccaacacaacgcttcttggaggaggcggggtagacggtgcgattcaccgggcagcaggaccggaattgctggaggaatgcaagacgttaggcggatgtgataccggtaaggccaagattaccaaagggtacaatctgccggcacattatgtgcttcatacgccgggacctatctggcatggtggatataattatgaggatgtgctgctgcaggggtgttatgagtactgcctgaaactgggagaacagtatggtctcaagacgattgcatttccatcgatcagtacaggggtgtacggctatccggtggaagaggcagcgaagatcgcggtgcggacaatctgtgattttctgaaatggacacaggtagtggaagaagtgaccatggtgtgtcacggtgaaggtacctggaaggtatatcaggaagcgtatcgggagtatcaggctgctgagagcgaaaagtagaaagaatgaaacgggcagagaggagtatgtacagcggggaatgtgcaggacttcatctgtccgctttttacacagaaagactatgggaggtttttgagaagatgaaaaagtcatatgagatggacatgtgtaccggtccattattgaagaaactgctgatctttgcggttcctttgatcttgtccggggtactgcagctgttgtttaatgctgcagatattgtagtagtaggaaaatttgcgggaagtcatgcacttgccgcagtgggatctacaggtgcgctgatcaacctgtttaccaatgtgtttatcggtttttccattggtgccaatgtactggttgcccagtattttggggcaaaagatgaacagaacatccaggataccgtacatacctcgatggcgattggcatcatcggcggaatgtttctgattgtggcaggtatgatttttgcaccgatgatgctggaagtgatggcaacaccggaggaagtgctgggacaggctgcattatatatccggatatattttatcggtatgccggcgatgctgatctataactttggggcggcggtgctgcgtgccatcggagacaccagaagaccgttgtactatctgctggaggcaggtgtggtcaatgtgattctgaatctggttttcgtgatcggatttcagatgggagttgccggtgtcgctatcgcgaccgtagtttcacagtgtatatcagcggcacttatcgtacgttgtctgatgaaaagtgagggaatgtaccggttgtatctgaaacggatccggattcacaaagagaagatgatccgtattatccagatcggacttcctgccgggttgcagggagcgattttttcaatctctaacgtgttgattcagtcatccatcaactctttcggagcgattgccatggcgggcaatacggcagccagtaacatagagggatttgtttatgtttccatgaatgctatttaccagacggcactgagctttgtcagccagaatgtgggagccggtcagcagaagcggattcccaaaatttccatatactgtatggcaattgtatttactgtcggacttgcgcttggtacactggcatatcgttgcggaggcaccttgcttggcatctattcgtccgatccggaagtgatcgcatatggtctggatcgtatgaaggttatctgccagatttattttctctgcggaatgatggacgtggcggtaggtattctgcgaggtatgggatattccatcatgccgatgctggtatctcttgcaggcgcctgtggactgcgaatcgtgtggatctttactgtctttgtatggaaacattcactgtttgtcctgtacctgtcgtatccgattacctggatcatcacattgagtgttcatctgatctgctttgcagtagtatggaaaagaaaaaaagggatctgggcgaccgtaaaaccgcatccggatcttggaaaaacggaggaataacatgcgtctgaaaaaaatacaggaagcgctgaaaacaaagaatattatatttacctatacagaagaggacaattgcggaagtcttgattttcagttccgtggactgcggtatcatatctgggaatttgtggatggtgacgtctggggcgtggagacgaatgtatatcatgccggaaaaagtgaggatattaccggagattacgaaaaagagatcagcgaactgatcttaagctggccggatatggcgattccgggataaatctaaagcaggtatttttgcagcggacagaggctttggagaagtaagaagtgtatagttacaaaaaaacagattcgattcaaattggatatttctcagaaagtatccgttttgagtcgaatctgtttttgatttgcattagaatttactcatcaacaacttccagtacatccatcggacatgcttttgcacagatgccgcaggcaatacatttggatgcagggttgccctctgtttttacgatcagaccaaatggacaggcttctgcacatttgccacagccggtacattttttcttgttgatcatataaacaccctttggattctgggtgattgcaccttccggacaggcttccgcacatttgccgcactgtgggcaggccattggacgaacagattttttctctacgatctggatgcaggatttgtccgggtcgaattctttatagaaagactcggaacaggctctgacacatgccagacatgccatacaggtactgcctttttttactttcagtttcttcatagtatcgtatcctccgctttatcagtaatgttaccgagaaatattctcaataatattattgtacagcaaacggtaagaaagtaaagagaaagttagtgaaaatcgtttaaaaatagtcagattttcttacagaaaatataccgcggaagcccaccgtatttgagggcttttgttacaagtttatatcccagctgctcaaaattatgtacactgtacacattatccggatgtgcggttcccatcagccagcgaaaaccggcagaacgaagctgctcttctgcggcttccattagtttcttttgcaatccattgccacgataggcactgcgcaccatggcaatctccatatgtgccaccagagaaagctgtgaatcgtccggttccagataacttcccaggttttcatcaccgagatcggaagtccgtgccacaaaaaccgccgccagtttctttctgccatccgcagcaactgcctccgctttcaatccaaacccggagactgtcatataacgaatcagattttcccgttcatccatactgaaccagcttttttcggggagttcacggtagatttcgttcatacagtcaagtaccgtggggagatcgctgggttctatttgggagatagagaagccaggaatggaagatatgttgaattgagcagacatagtaaatactccttttagttttctgtgtaaaattaaaataactattataaatatataggggagaaggtatggttgtaaagaacattttctttcgacatccggataaaaataagttatattagagtcaaatgaaaaaggtaaatagggtgatttcgtacaatttacggaaacaggactccaccagcaataaaaggtgtataattttgtcaaaatcgcggaaaataaaattataattaaaaatatgagaaattatcgcggaaaatatgttgaaaaaataaaaaagcgagacgctgatgaatggtggaagaactagcgaagtatttgccggaggaacagaaaaagttttttagttagatatctgtagtttatagaatcaacatacacagacataccccccaaatcccctgcatacattgtaaaaataatgtacgcaggggattttattgtgaaagattatattgaggagcgtgcagtagaaattgcgggctatatcatagaaacaaaagctacggtgcggcagacggcgaagcaattcgggatcagtaagtctacggtacataaagactgtaccgatcgtcttcagcagatcaacccatccctggcacgggcggtccggaatgtgctggatgtcaacaagcaggaacgccatatccggggaggaatggcgaccagggagaagtatctgcatctgggagagtaaagatacgaaacaaaacagagaaaaacaaaacagaaaacatccgtcaggaaaaccggagagaaggaaaagcacagatggacataatcccttccgcctttacatagaatagacagaacggcgagaagtaaagggggaacaggattgtacgatcgtggtttgggggtgttggaacagtatggtctgaccgcggagacggtattgcggggcaggggagcgctgatctgtcagacggagaaaggatggaaaagtatccgcgaatattggggctcccccgggaggctggagcagcagagaaaaatacagaaacgctgcaaggagaccgggttcttactggtggatcaggtggaggaaaatctggaaggacaggtggtcactacgggagaagacgggattccctatgtagtgaaagaatggtttcagggaacggaatgtaacaccagatccggggaagatattttaagcagtatggaagcgatggcaaaactacatacggtaatgcaggcagagcaggacgaagatatgccaggagcagatcttctggaagagtgccgcagacacaaccgggaacttcgcagaaccagaaaatttgtacagaaaaagaaggcgaaaaacccgtttgaagagcggctggcgcagagcatcactgcttttctggaagcaggggagggaatggtaaaagaactggaagactccgattatgaaagattctgtaaagaacacaggcaggaggtatgtcacggggactgtaaccagcataacattatttttacacgggaaggcataggttttatgaattttgattactggcattgtggaccacagacagaagatctgtgtctgtttatgagaaaaatcctggaaaaacataactgggatcctgagcttggaagaagaatggcagaacagtataatcgaaagcgatcgctgtctgtggaagagtggaaacatctgaaactgtgcctttcttatccgtggaggtattggaaactggtaaactattatgcatccagtcagaaggtatggatatccagaaaaaacattgaaaaaatagaacaggcaacagcactctggcagccgtggcaacgttttttacagagtttctgctgaaaaatagctgtgaaaaagggcgaaaacacctaaaaaccttgacaaaacaagagaggcagtatataaataggtgtagcgttgtaaaccattcagcaggaaaagcctgggaaggtacgaaaaagctataaggtatgtaattactaatttacgaaacaggaggaatatcatgaacaaaacagaattagttgcagctatggctgaacagacacagttatctaaaaaggatgcagaagctgctttaaaagcttttatcgatgtagtatctgaagaaatgaaaaaaggagaaaaagtacagctggtaggtttcggtactttcgaagtatctgaaagagcagcaagagaaggaagaaacccggctaccggtgaatccatggtgatcaaagcttccaaagctccaaaatttaaagctggaaaagctctgaaagatctggtaaacgaataatttacttatgagattagataaatatttgaaagtttcccgcctgatcaaacgaagaactgtggcaaatgaggcctgtgatgcaggaagagtcctgatcaatgaccgcccggcgaaagcgtctgcacaggtgaaggaaggagatgttctggagatccagttcggcagcaaagctgtcagagtggaagtgctgaatgtacaggagactgtgaagaaagaagaggctcaggaactgtatcgttatttgtagagcaaaaaggtcagtccggcataagccttttgagagggcacagaggaacagcgaaggaaataacatgagaagtaggatcccttcatataatgtatcagtacattgtatggagggatttttatatggaagaaaagaaagaagtaacgcacagcctccatctggaacagagagggcatggattgatcaccggggtcactgagatgaaatcatttgatgaagaaaacatttttatggaaacgagccagggtacactggcgatcaggggaaacagcctccatgtatgccgtctggagcttgagaagggagaggcagagattgagggaaaagtagacagtctgatctatacacaggggagaaaagaaaaaaagaaaggaagcctgttaaaaaggctgtttcagtagatgaacacctatatggggagagaactggaactgctggtacaaagtatgatctgcggtgctcttcttgttctggtttatgatgggatccgaatctttcggataataggaaaacgggtgaaaagtctggatactgcggtggatattttgttttggagcgcagccgggctttttttattttttatgtgtctgagagagaacgggggaagcgtgcggtgttatctgctttgcggaattttgctgggagcaggtgtctggtattggggaatcgggcatttttatagagaatttgcatttattttggcaaaaaggttgcatttttgtttacaaagagttacaatttttttacttgtaaaaatgcgtaaattctgtttaaaaatacgtaaaggcccggggatagataaaagtaagggagcgtggaatgaaaaaaaggaaaagtgctgtgcgaggaaaaaacgcaggagcacgaaggataaaggttcagaatagagtcgcgatgatttctatcagtatggtagtctgtatgctggtggtattgcttgctttcaaagagcattcgttgcaggtgaaatatcagacaaatgaaaacagaaaagctcagcttcaagaagagataacgacagaagaggcccgtaccaaagatattgaagatatgcaggaatatatgcagagcgacgaatatgcggaaaagattgcaaaagagaagatcggtctggtaaaggacaacgagattatctttaaagaaaataaataagcaaaaaatggctgttcgtgtcaaaaatttctgaccggacagcctgtctgtttgacaagttttttgcagcatgtcatctataataagttttcaggagtaactgtgaaaagaggaagcagttatcagcgtaagatgccgtaagggggttatggatgcatgcagatatggatggttgccatgctcgcagtcagtgcagtgctgatactacgggacatggcaaaacttgttttcacggggagaaaaaagggtcgtccggtatacgatgtttatccacagaaagaaaagattgaccggtatgcacggtctttacagaaacttgctcatacgttctatgagatgcccggcaggcaggaacagttgagtcaggcagaagtacaggatatgtttgtgcaggtgcaacagcgggtgtgcatggagtgctccggaagagaaaactgctggtcagatcttgatccgcgaaccagccagcaggtatttgaactgttgcagatcatagaagagggcaatcccgaccgccttttacatgcacagagtgaatggcttgggcagtgccaccaggctttcaggtttacagaggagctgcagcgcatcttttttgaaaccagagaagaattgttgtatcgcaatcggctgattgaaaacaggattgctgtggcggaacagctacaggaggtggcgcggacgatccggaaaatttcttctgatgtcagtgcggtgtgtatcctgccggatgaggaagaagagcgaatgcgaaaatatatgcataaacagagaatcctggtaaaacagatctggtttcttgatcgacaggacgaaaagaaacggatttctctcacgatgcgcacacggggaggacaatgtatgaccatgaaagaagtcgcgaagcatctttcacatgtgtgtggctgtcggatggttccgtcacaggacagtaaggccgtactgaacagcgagtggcgtacggtactgttctgtgaggatgtgaactataaagtgctttacggtgtggccagagtcacgaaagaacgggagacgatttccggggataattatgcctgtgcagccacagatgaacagtttacgatgtgtctttcggatgggatggggtccggtatggaggcgagtaaggaaagtgaaactgtggtagaattactggaacagttcgtaacttccgggttctccagagagacagcggtacgaatggtgaattcggcattgatcttacagcgaaaaggtgggatgttttccagcctggatgtgtgttcgctggatctgtatacgggcatctgcgaatttttaaaggcaggggctgctacaacgtttatacggagaggtaactgggtggagacgatcacttctaccagtatggcagcaggactggtacagaaactggaatttgaaaaaacaacaaaaaaattatatgacggtgattatctggtaatggtcacggatggtgtactggatgcttttggggaagaacccggagaagaaatcttaaaggagtggattctgcaggcacaggaacagatgccaaaagaactggggaggtatctgttggaaaaaacattacagtatgcagactaccgggcaaaagatgacatgacagtcctggttgcgggaatatggagaaaataaatgactacaaaaggcagaagtggacaaactgataaaacgatgtggaaaacagaacagaaagtgaaaacatatgtggaaaaattccgcatgatcgaaccgggtgacaccattgtactggggatttccggtggggcagattcggtgtgcctgctgaagctcctttcaaagtggaaagaatcatggggaatttcgctgaaggcagttcatgtgcatcatcagctgcgggggaaggaggcagatgatgacgaggcctttgtccgacgactctgtgaaggagaaggaattgtctgccaggtgtttcatgaggatgtacagggaattgccaaccgggagaaaacaggtcttgaggaagcgggaaggcttgcaaggtatcggtgttttacaaaagtctgtgaagaggccggcggaggaaagattgcccttgcccatcatcaggatgatcttgcggaaacgatgcttcatcacctggtgagggggacaggcatagcgggtctttgcagtctgaaaccggtatccggcaatcggatccggccattactctgtctgggaaaagaggagattctggcatatctggaagaggcaggacagtcctggagaacagacagcagcaatctggaagatgattataccagaaaccggatccggcatcatgtgctggaagaactgaaaacagaggttaatccacaggcagtgaggcatatggcacagctgagcgaagaactggaagaagccagagaagtgcttgcccgggtggcagagaaagagagaaaacgatatgtaaaagaagatgcagatggtgctatacttttagaagcactgaaaaaagaaccggatctgatcagccggcagatcatacacacacttttaaaagagatttcaggaaaacagaagaattttaccagaatccatatagaagcggtgcagcagttatggaaacagaaggtaggggcaagaagagatcttccttatgagatgcaggcaaggcgaacctatgatgggattctgctgggacagaaaaaagaaaaaaccagcaataccggaaaaaatgaagcaattccggtaacggtacagagttcacagtcagaatcttttcaggcaggagatttgattcttacagtaagtctgatttcccgtgattttgggaaaatacaggaaaagaagtatacgaaatggtttgattatgatagaatagaacagaaactggtgatccggcacagacaaccgggagatcggatctgtctttttgacggaggaggcagtaagaaactgaaagattacctgatcgaccgaaagatcccggtggaagaacgggatcagctgtggcttctggcagacggttctgagatcctgtggatcataggagacagaatcagcgcagcgtataaagtgaaggagcaaagcagtcgaatcttacaggcagagattaaaggaggaagtactcatgagtgataaaatcagtgtattgatcagcgaagaggatgtagaaaagaggattcaggagataggatcggcaattagcaaagaatacgaaggaaaatgcgtgcatctgatctgtgtattaaaaggtggcgtattttttgcatgcgaacttgcaaaaagaatcagtgtaccggtaaccattgactttatgtccgtatccagctatggagatgacacgaaatcaagcggtgttgtaaaaattgtgaaagatctggatcagccgctggaaggaagagatgttctgatcgtggaggatatcattgattccggacgtactttaagttatctgatcgagattctgaaaaagagaaatccggcaagcctgaaactgtgtacactgctggacaaaccggaacgtcgtgtgaaagaagtacatgtagattatacctgttttaatattccggatgaatttgttgtgggttatggtctggattacgcacagcgttacagaaatctgccgtttatcggcgtggtagaaccgggtgcaggagaagaataataacctgagttttaaaaaatgaataaaaacagtcacagactgaaaaaaatatagagtgtacgcagggtatcttccggaaaatatttcgtagagatttcctgcgtacctcagacccgaaaggagaaacaacgtgtcaaaacaactgaaaggggtaggagtctggctgattgtattggtgctgatgattgccggattgtcctatcttggcgagaagctacagacgcagaataactattcctataaagaactggaagaggatctggaaaatcatcgggtggcagaggcagtgattcatcagaaccagcagacgcctaccggccagctgattgcggttcttatgaacggaagaagtaaagatatgtatattgacgatgtcaaagaagtacgtcagatgctggaagatgcaaatgtatcttatcagatgacagatgtaccgaaggaaagtaaactgctcagcgtgggtgttccgatcgcctctcttggtgtgatggtgatcctgctgtttatgctgatgggaagaaacgccggaagcggtggcggcggaagcaaaatgatgaattttggcaaaagccgtgcacagctgacacaaccatccggcaaacgatttactttccgtgatgttgccggtctgcaggaggaaaaagaagatctgaaagagatcgttgatttcttgaaaagcccggataaatataacaaagtaggtgcaagaatcccgaaaggtgtacttctggtaggccctccgggtaccggtaagacactgatggcaaaagcagttgcaggggaagcgggcgttccgttcttttctatctcaggatctgattttgtggaaatgtttgtcggtgttggtgcttcccgtgtccgtgatctttttgaggaaggaaaacgtcacagcccgtgtattatctttattgatgagatcgatgctgtggcaagacgaagaggaaccggcatgggcggcggtcatgacgaaagagaacagacgctgaaccagttactggtagagatggatggtttcggggttaatgagggaatcatcgtgatggcagcaaccaaccgtgtggatatcctggatccggccattcttcgtccgggacgatttgaccgtaccattgcggtaggtgcaccggatgtccgtggaagagaggagatcctgaaggttcatgcaaagggcaaacccctgggagatgatgtggatctggcacagatcgcacagaccaccgcaggatttacaggagcggaactggagaatctgctgaatgaagcggccatcttggcagcaaaagaggatcgtcagttcctttgccagaaagatatccagaaagcatttatcaaagtcggtatcggaacggaaaaacacagccgcgtgatctcggaaaaagagaaaaagatcacagcgtaccatgaagcaggtcacgcaatcctgttccatgtgctcgaaaagatggatccggtgtatacaatctccattattccgacgggagccggtgcagcgggttatacgatgccacttccgaaccgggatgagatgtttaataccagaggaaagatgctggaaaatattgaagtatgccttggtggaagaatcgcagaggaactgatctttgacgatatcaccaccggtgcatccgaagatatccgccgtgccacaggcatcgccaaagcaatggtgacaaaatatggtatgtctgccaatatgggtatggtgacctacggtgatgagcaggacgaagtctttatcggcagagatctggcgcacagccgtggattcagcgagacgacagcggcagcgattgaccgggaagtaaaagaaattatcgatgagtgttatgtaaaagcgaaagcaagtatccaggcacacagttatgttctggaacattgtgcacagcttcttctggaaaaagagaagattggaagaacagaattcgaaaaattattcgaagaggaaaaaaatgcggcagcttccgggggaattgtacaaaattccgaagagaaaaaataagagcttttttatctgtaaaaaaatgaataaaaaattgcacaaaaaaaatccatgtttgtgcacacttttccctggctacatgctattataataactgtaaaaaccccccaatacattatatagtttttgctacaccccataagagaaataccttctccaaaaaagacagctttggctgtctttttttctttcttgcatatcaatagccggtccgccggctcaagttcggtgccctgctatcaataacggaaaaatcgtggcttatacgggaaaataatatttgcaattcacaggaagctataataaaatggaaaagtattatcagaaaataaaggagtttgcgatatatgaaagcgattttgcagggattttatcagaaagaacatttctggctgagacttggcgtggtactgctggcagtattcggaatggggtttgcgttatcgttgctgctgttggtggatatgggaacagatccgtgcagtatgatgagcaaagcgatttccgcaaagatcggtatgagttttggaaactggcaggcactgatgaacacggtgcttctggtactggttgtaatcttcggaggaagaaaccttggctttggaacactggcgaatatgtttctcatcggatactttgtagacttcttcacatggatctggaaccgggtactgccggcagatttttttaccacgctgccggttcggatcgcagtactgattccatcggtgatactgttcattctgacagctgctttatatatggatgtggatatgggaacggctccctatgatgccattccgattattatttccggacatttgccaaaagtaccgtttaaggtgatacggatcgcctttgatttttcggtaaccatgatcggtttttcctttggcggaaagattggagcgatgactgtcattatgatcctggctctgggacctgtgatccagtggcttggcgatatcatgaaaaagcattttcctgcactgacaggagaaggatgagaataaaatagaatataagtgtaactatttagcaggcggtatcctgtgcgggtactgaacggttacatataagcgactgcgagaagggaagggaaaacatggaagatctgaataatgtactccgtgcacaggaatatatcaataaaatgcgaccggtatttaataaacgggccttatacagcgatgagacagcacagtacagaacaccgatggaaccggaaccgggagatatcgtgacggttcgattccggacactgaaaaacaatgtagatgctgtttattttatcagcggtacgatccgcaaagagatgaaagtggaggagagccgggaaggatttgattattatgcgattcagattccggtaggaagtgaaccaatccattattattttgagatccgggcaggaaaaattgtctgttattacaatgaacttggtgtgacccgtcagttgcaggaacagtattcttttggtatcatcccgggattccatacaccggactgggcaaaaggggcggtaatgtaccagatttttgtggatcgtttttataacggagacagctccaacgatgtgctgaccaatgaatatttttatatttccggccacagcagacggatcgaagactggagcaagataccggacaatatggacgtgaacaatttctacggtggcgatctgcagggtgttatggataaactggactatctgcaggatctcggtgtggaagtcatctatctgaatccgatctttgtatcaccgtcgaaccacaagtatgacattcaggattatgactatgtggatccgcattttggaaaaattgttcatgatgagggcaatctgctggcagactgggacaaagacaatacccatgccaaacgatatattgaccgtgtgaccaacaaagaaaatctggaagccagcaatcagctgttcatcgagctggtggaagagatccacaaaagaggcatgaaagtgatcctggacggtgtatttaaccattgtggatcctttaacaaatggctggatcgggaacggatctatgaaaatcagccgggctacgaaaaaggcgcatttatcagtggagacagcccgtatcacagcttttttaagttccataatgaacactgctggccttacaatgaattctatgacggctggtggggacataatacccttccaaagctgaattatgaagattctgaaaaactatacgaggatatcctgcgcatcgcgaaaaaatgggtttctgcaccgttttacgtggatggctggcgtctggatgtggcagcggatctggggcacagtgcggagtacaatcataagttctggagacagttccgaaaggtggtaaaagaggccaatccggaggcgatcattatcgcagaacactacggagatgccagtccgtggctgcagggagatcagtgggataccgttatgaactatgatgcgtttatggagccgatttcctggtttttgaccggacttgaaaagcacagtgatcagtaccggcaggatctgaaagggaatgcagagtgtttccgtgattccatgcgctataacggttcacgattctatgcaccgtctcttctgactgcgatgaacgagctggataatcacgatcattccagattccttacgagaaccaacagccgtgtaggacgtatcaatacagttggcgcgagagcagcagaggaaggaatcaacaaggctattttaagagaagcagttgccattcagatgacctggccgggtgctcctactgtttattatggagatgaagccggtgtctgtggtttcaccgatccggataaccggagaacgtatccgtggggacatgaggaccagtatctggtacagttctaccgggatgcgatccggatgcacagagaactgccggtattaaaatacggatctgtaaagatgctgaaagaagactataatctgatttcctttggacgttttaatgaaaacgagcaggttgtcgttgtcatcaataacaacaacgaaaacaagaaagtagagattccggtatgggagaccggtatcagcagaagtgtcgatactaccatgaccagaattcttgacagcaacgccatcgcctacgatatggaacagaaagaatacccggtagtggtaggctacctggaactggagatgtccccactggaagcgattgtcctgtgcaggggatgtgaacttccgcagaagaaggacgaagaagctgttgagaaagaggaagatacatccacagttctcgagaattaaaaaactaaaaatatcttgcaaatcagttagaaaagacttgcaatttaaaaaagattgcgttataattctatcttgtcagagcgtgtgaatgctttggcaagatatggatggattcccgagtggccaaaggggacagactgtaaatctgctgcaaattgcttcggtggttcgaatccacctccatccattaggataaaggtagttcagagttgaaattgctgaaatgatagcaaaaaggttcgaatccacctccatccatcggatactaaatagtatccattatatatatgaaagttagctagttgggacagtgcttgcacgtatgcccacgattgaagctgtattcatatgtatatgccgcagtggcggaactggcagacgcccgggacttaaaatcccgtgggtagtgatacccgtaccggttcgattccggtctgcggcagtagttgaagataagagaaacgttgaagatacagcgtttctcttttttaatttacaggaaattgtttttctgcaaattaaaaatactctgccaaaagcttgaaaaggaaatgacaaagtgctattgtcgatattgaggcagggatcagatgggtatgcagcaaatggttgatgggagcatatatgggaagtttaagtgtaatacctttcataggaatttttggaatactgtttatagtatttaatatagttctttttgtgctggtagtactgacgattatatttggtgttataagatttaagaagaaaaagtttaaaaagatatttcttgtattattagcgataactgttttagcaggaataaaggattatcaaatagtaaatgaatttgtgaattatgatgagattaagcatcagaatctgataaaagaagaaggaaaagagttagttgctatcagagataatgattataataaagtggaacaatatttaaaaagcgggtgggatccgaatgaaaatacaaagtcggtgtattattctataaagtataatactgaaagtaataagaaaaaagatgagtggaaaatattagaattactgttaaaacatggagcaaacccggatgtccagatttttgaaaatccaacaggagtaaatacaccattaacctatacaacagaatgcggttattatggagcaaccaaacttctgctggaatatggtgcagattgtaattttcaagaagattatatgaagcagaatggtttacttgcacttagattttacgaaaatgatgcagctgccaaaacgttgcagttattgcttgattatggaacagatttggatataaaacaaagtgataataagtcagggcgagaagaattaaaaaattttcagaaagattatatgaatgtaaaagataaagtgccaaattatgatgagatagtggagattattgacagacttgaaatctaaaatcgggagcaacgaattggttgctcccgattttagatttcaaaaaagcacgagacgggattcgaacccgcgaccctcgccttggcaaggcgatactccaccactgagccactcgtgcataaataactgatattcagttaaaagcgggtgatgggaatcgaacccacgtatccagcttggaaggctggtgttctaccattgaactacacccgcaagtgtttgtcgctgacaacataatgtattatatattaatcagtcgagattgtcaagaacttttttaacttttttttgaaaagttttttgttcctggtatcggatgaaccgataatgcccagaaccggaatcgaaccagtgacacgaggattttcagtcctctgctctaccaactgagctatctgggcaagctcgaggtatatattagcatactttttttgaaagtgcaagatgtaaaattcaaattttgtaaaaaaatacaagaacagaaaattcatatatttgtaaacagggaacggcgagtgactattgagataaccggaaagatacagtataataagagccattcggaggttataatgcaatggcagaaagaaaacatatattgctggcagcaatcaatgcaaaatatatccattccaatctggcggtatacagcttaaaggcgtatgcgaaaaaataccaggatcagatcgggctggcggagtatacgatcaatcagaatctggatgatattttaaaggggatttatcgcgatcatccggaggtcctgtgcatttcctgctatatctggaatatttcctatgtgaagaatctgatccgggaagtgcataaggtgcttcctgacacagccatctggctgggaggaccggaagtgtcctatgatgcgcggaaggtgctggaggagcatccggaagtgacaggtgtgatgaaaggggaaggggaagtgactttcctggagctggcgggcttttatctggaaggcatctcagaactggcgaagattgagggaattacctacagggacggggatcagatccaggagaatccatggagaggaatcacggatctgagtacaattccgtttgtctacaaagatctggaaaaattcgaaaaccgtattatttattatgagtcgagcaggggctgtccgttctcctgcagctactgtctctcctcgatcgacaagaaactgcggttccgggatctggaactggtcaaagaggaattacagtttttcctggatcataacgtgccacaggtaaaattcgtggatcggacttttaactgtaaacacgatcatgcgatggcgatctggaagtacctgatcgctcacgacaacgggatcacgaattttcattttgaggtggcagcggatctgttaaatgaggaagagatcgcactgattcgcacgatgcgtccgggaatgatccagctggagatcggtgtgcagtcgacgaatccggatacgatccgggagatccaccggaaaatggattttgctcaggtatccgaggtggtgacacgggtgcaggaaggacataacgtacaccagcacctggatctgatcgcgggtctcccatatgaagactatgattcgtttggaaaatcattctgtgatgtctatcagctgcggccgcagcagctgcagctgggatttctgaaagtgttaaagggatcctttatgtatcaggcggcgccggagtacggttgtgtatgtcagagccgggagccttacgaggtgctgtataccaggtggctgccatatgatgacgttctgcgactgaaactggtggaagagatggtggaagtctattataatagtaatcagttcggaaaaaccctgcgtgcgatagaaaaattatttgacaatccatttgcactgtatgaggctctgggagcattttatgataagaaggggtatatggatatttcacataccaggatccgtcgatacgagattttacaggaattcctgcaggaatatgtagatgaggagcagatggattattaccggcagctgatgatctgtgatctgtatgcgagagaaaatatgaaaaccagaccggcatgggcgaaggatctgaaagcgtataagagagacatccgggagttttatctgaaagaagaagagacacatgagtatctgccggagtatgaaggatatgatgagaaacagctggcgcgtatgacccatctggagcggatggactacgatccggataccggagtgagggagccgtgctggatcctgtttgattaccggagcagggatgtactgacgtacgatgcgaaaatggtaaaattatcattggttgacataatgcaaaaataattgcctgttgcctgccggggaaaaacggatgacagatgagcagaagtatgttttccggtacagggagcagttagtaggagaagacgaagggtaagagagaaaggaaaagaaaatacgatggaaaaaacagcatgtccgtccagctatgtggttgtggatctggagaccacggggctgtatccgtctcaggaccggatcctggagatcggagcggtcaaggttctggacggagaggtggcagataccttttgtatgtttgcagatccgcagatgaagattccggagaagatccgggaattaacgggaattacacaggagatggtagctggacagccgacaccggcagaagcagtgcgtgcctttctggatttctgcggggaactggatctgatggggcacaacctgatctttgattacagctttctgaagcatcaggcggcggatcagaagattccttttgaaaaaaatggaattgatactctgaagatcgcaagaacgctgcttccggatctggagagcaggagcctgacgaatctgtgcgggtattttcagatcgaccgggcacatgcgcaccgggcgtatcacgacgcactggcaacccatgaactgtatcaacatctgatacggatcgcagaagaagggcaggagcggatctttcagccgaaacagttacagtataaggtaaaacgacgcggtccgatcacaccggcacaaaaagcatacttgaatgatctggtgaaatatcataaaatagaactggatgtgtctgttgacagcttaacgaaaaatgaggcatccaggaaaatcgatacgattattgcccggtacgggcgcataaagaggtgaatgaaaaatgaatatgtggaagaaaaaaagaaggcagattgtagcgggaattatcgcagttatactggtacttgcgatggtggttccgatggttttggaagtaatgttataagggattgacatacagatgaagaagaaaataatggcggccctgctggcgggagtcatgctgttacagcagcctgtcagcggatggtgcgcacagaatacagagctcacacagaagtcagaggcgaggcaggagagtgaaagcagtgaagatacggctgacggaagtgaggaagacacagaggctaccggaacagctgctgcagatgacggagaaaacagtcaggaagaagacagcgaagatgtgccgacactgcaggcagagacggatgaagtcacactcgataccggtacctcggacaatgcgcctgagggacagcggaagattctggatcatatttacgcggaaagtgtggatctgtccggtatgacgcaagaagaggcacaggaagcgctgcagacccgagtggatgagattacaggttatcagatcgttcttcatatggatgatatgtccaccggtgtgacagcaaaagaactgggtgttaccggggataatgacggcacgatccggcaggcgatggatgtgggacaggtcggcaatgtcatcaaacgatataaggtgaaaaaagcactggaacaggaaaatctgcagctggatctttcttatcaggtagatgaggagagtgtgaggaaggcactggagacctattgtgtagcgttgaaccgtgaagtggtgaattatgagttgaccagagaaaatggtgagttcaagatcaccaacggtgcgcgtggagttaccttgaatgaggatggttctgtggataaagtgaaggattatctggaacatgtgtggaaagatggtccgggaagtgtggatctggatgtggagatcacagagccgaaaggatcccaggaagaactggcgaaagtaaaggatgtactgggacagggagtcaccgattattccgccagcagcgcagccagagcgacgaatgtaaaaaacggtacttccaaactgaacgggaaagttctctatcctggagaggagatttccgtctgtgacaatatggtaccgtttaccgaagaaaatggatatgcaccggccgcatcatatgcgaatggtacggtagtggaatcttttggaggaggtatctgtcaggtatctacaaccttatatcaggcagtattacaggcagaactggaagtgacagagcgacataatcattccatgatcgtcaaatatgtagaaccgtccatggatgcggcaattgcagaaggtgcaaaggatttccggtttgtgaataatacggaagcaccgatttatattgaaggatatacctacggaggaaaaatttattttaatctgtatggagaggaatatcgttctgcagaccgaaaagtgacctatgaaagtgaaacgctggagactattgatccgacgaccgaactgactgcagatccggagaaagcctttggaagtatggaacagatccagagtgcccataccggatacaaggcaaaactgtggaaaattgtcacggagaatggggaacaggtcagcaaagaagaagtaaataacagttattatcagatgacgccaaataaatacaaagtcggtgtaaaaaccagcaatgcggaagcgtccagcgccatgtatacagcaattgcaaacaacgatctgaatcaggtctatgtggtactgaaccagtatggcggctgacagatgcggaggagaaaatcatgaagataggaaaactgccggaaccggtattgatccgttcggtattaaaacaggtaaaacacagaagagaggaagtactggtcggtccggcggtagggcaggactgcgccgctcttgaggtaggtgaagatgaagttctggtgatgtccacggatccgattacgggaaccgcaaaggatctgggacatcacagcatccatatcacggcaaatgatcttgcggcagccggtgcagatccggtgggagtgatgctgactgtaatgctcccggataccgttgaagagccggagatccgaaaaatgatgcaggatgcggaagaaacatgtgaaaaactgcatatagagatcctgggtgggcatacggagatcaccaatgtggtaaagcagccgttgatctccgtaaccggtgttggcaagatgaaaaaagagaatctgcgcacggtatctcagattcgtccggatcaggatatcatcgtgaccaaatggatcggcctggaggcaacgacgattcttgcaaaagaaaaagaagaagagctcaaaaaaagatttccggctattctgattgacacagcaaaagattttgaccagtatctgtcggtggtaccggagtcacggatcgccgtggagcatggtgtatcctctatgcatgatatcaccgagggtggtgtctttggtgcgttctgggagatggcaagcggagccggggtcggtctggaagtggatctgaagaaaatcccgatccgtcaggagaccgtggaaatctgcaactactttggggtcaatccctaccagatcatgtccagcggttccatgatgatcgcggcagacgatggtcacgaactggtgagaaaactggaacaggcaggcatccatgccgttgtggtagggcgtaccaacagcgggaacgaccggatccttcgaaatggtgaggatgtccggtatctggacaaaccacagcctgacgagttatacaaagtaatggggtaagagaatatggcaaagttaaatattgttctttatgagccggagatcccgtccaacacaggaaatatcggacgtacctgtgtggcgacaggtacgagactgcatctgatcgagccgctgggtttccggttaaatgaaaaatcaatcaaacgtgcagggatggattactgggatgacctggatgtcacccggtatattgattatcaggatttcctggagaaaaacccgggagccaagatctatatggcatcgacaaaagcaccgcagacctatacggaagtgcagtatgaggaagatgcctacattatgtttggaaaagaaagcggcgggatcccggaggagattttactggaaaatcaggagactgcgatccgtatcccgatgatgaacgatatccgttcgctgaatctgagcaattccgtagcgatcgtactctacgaggcactgagacagcacaattttgatcatatgcagctgggcggtcatctgaccagatatgagtggaaataaagaaagacaggataaaaaaagcaggggaatcagctggttcccttgcttttttctaatgtaaagataaattcggtaccgacaccttcagtactgataacattgatattctgattatgtgcggcaatgatctcgcggacaatagatagtccgagaccggtgcccttgcggtctttgccgcgggaagaatcaatcttataaaaccgatcccagattttattctgtttttctctgggaatacccacaccggagtcttttatggatacgaaaactgtaccgtgacgttcggaagtttctgccttgatgatggagttgtcagaactgaatttgatggcgttatcgatcaggttgtacagaacctgctggatctgttccatatcggcgtgcaccatcagagtttctgactccagatgcagttcaatggtaatcatctttttgcggcagattccctcaaaagtggctactgtatttttgatcgtacggttgatatcaaagtcgttcatatgcaaaggacgccctttggagtccagtttatccagggtcagaagactctgggtcagcttttccaaacgttcggtctcatcaaccacgattttcagataacgatcctgcatctcaggtggaatcgttccgtccatgatcgcttccacaaaacccttgattgaagtaaggggggagcgaaaatcatgggagacattggctacgaatttgtgctgatattctcccgatttgctcagttctccggacatatagttcagggtatcggccaggtagcccatttcatcattggttgtgacaggaatgttataatccagatttcctgctgcatattcgttggctcctgcggtgattttcttcagcggccggtatacggaatgagaaaacagaccaagaatcatgagagaacaaagcagcaggatcgcaaacacgatatggaccggaccgagaacggattctttctgatcaatgatcacggtcatcggaagatgaatcgatacataccctttggtggtcaggtttttcgtgataggaaccagtgtgctgaccatattttccttaaaatatccatgaaaagtacctgtaatataattgtctgatcccatgatcgcaggatcaaagtctttaagcgagctttgtgccattgcagtgtatggtttgccggtatcaatcaatggctgtccggacgggttcagaatcaggatccgggaatcctgaaaagcagagagggtctttagctgattataggcagcttccacatctgcattgtctgaataatccgtatttgcctgataggaggcgagagaaatcgcttctttgtacagggcggctccggtgtcttccagaatatgtttctggatcagggaagatcccagcgtagagattaacaccgttccgagaataccgagaaaaatataggctgtgataaatttggaatacagtgtttgtctcatcaggatttaacctcaaatttgtaaccgatgccccatacagtactgatcgaccaggacggatgatctttgatcttttcacgcagtctcttgatatgtacgtctacggtacgggtatcgccgatgtattcatatccccagatatgatccagaagctgttctctggtaaatacctgattaggtgaggaagcgagaaaatacagaagttccagttcctttggcggcatgtcgatagtcatcccctgatagataacggaatagttggtcagattgatgatcagatccggatattccacgtattttccggcaggtgccgacggagcggaaggggcaggctggaaacggcgaagaaccgctttgaccctggctaccagttctttggaatcgaaaggtttgatcatataatcgtcagcccccagttccaggccgagcaccttatcaaaaacttctccttttgcagagagcatgatgatcggtacattggatttgtggcgaatctctctgcagacctgatagccgtccataccgggaagcatcagatccaggaggatcaggttcggctgaaaggaaggaaatgcactcaaagcttcctccccgtcgttgacaatcttacactcaaaacattctttggtaagataaagagatatcagttcggcgatgttgttgtcatcgtctacaatcattattttctgtttggataccataaaaactccttgttgtagcgggatattacctactgaatagttattttatttcttgaaatttacaatcgtaacaccggcatctccctcgccaaattctgcaagatggaaggaagagacatattttacccggcgcagatagttatggatgcccttccgcagggctccggtaccttttccgtgaacgacacggacacttggaatatgtgccagatatgcatcatccagatacttatccagttccgcgatggcttcgtcgacggtgcggccaagcaggttgatctcgatgccgacggatgaagattttgacatcttgatcttcccggcgctggtgcgctgcatattcggtgcggagatcacggtttcttcctgtaacagtaccagatcggagatatggatcttggatcgcatgatacccatctgtaccagaagataacctttggcatccgggagggtgcttaccgttcctttgagattcagactcagtactttcacaccatcgcccagatgcagatcggaaggcttcagattacctgtgaccttcttttctttcctggacatattgctttcgactttgttcatcttcttacggagatcctgtcgtttattttccatttctttgatggaaatattggcttttccgaatttgttaaagtctttgatcgtctgatccgcatattcttttgcatcacggaggattgcatgtgcctgctcgttggcttcccggaggatccggtcacgctgctggttcagtttttcctgcttggtctccagctgttttttcagatcttcgacttcggtcttgtagcgggcaatctccatgcgttctttttcgatggtgatacggttttcttccagggtggagatcacatcctcgaaggactcgtcttcctggctgatctgtttttttgcatcatcgataatatacgatggcagtcccagcttactggaaatggcaaaggcattactctttccgggaacaccgatcagtaagcggtaggtaggacgaagcgtttccacatcaaattcacaggaagcattttctacacccggtgtggagagtgcgtacactttcaactcactgtaatgcgtggttgccatagcccggatgccctgtttttgcagatagttcagaatcgagattgccagtgcggcaccttccgtcgggtcggtaccggcacccagttcatcgaagagaacgagggacttcggatcggccttttcgataaaggaaaccacattggtcatatgggaggagaaggtactgagtgactgttcgatactctgttcatctccgatatccgcatatacctcctcaaaaacagataattcagaacgatccagtgcaggaatatgaagacctgcctgacccatcagagtcagaagcccgacggtttttaaggaaacagtttttccaccggtattcggaccggtaacgatgagcagatgaaattcttttccaagatggatatcgatcggaacaacctttttcttgtcgatcagtgggtgacggcctttgcggatgttgatatagcctttggtattaaagatcggtcgtgtggcattcatatccatggcaagggcagcgcgggcaaagataaagtccagttctaccagattttccaggttatagcggagattttcacgttcctgggcagccatgttacttaaagaagccaggatgacttcaatctctgccgcttctttcatctccagatcacggatctcattgttcagttttacgatcgccatcggttcgataaagagggtggaaccggtggaagactgatcatggatcataccaggtacctggcttttgtattcggctttgaccgggatacagtagcggccgtttcgcatggtgatcacagcgtcctgcagatatgttcttgcggagccgttgaccataccggcaagctgtgtatgaatgcgttctccggtcactttcatcgaacggcggatctgttttaaggttgcgcttgcatcatcggcgatctcgtcttcggagaggatgcatcgacgaatctctgtatttaacagcggcagaggttccagggcatcgaaaagatcatccagagagtccctctgttcattttctttttcacggcgaccgtaagattttacccgggaggtattatccagaagggcacagatctgcaacagttctgtgatccccagggtacttccgatctccaggcgtttcagggaaccgcggatatctttggcactgccgaagttaatgtttcctttctgaaacagacgggacagggcatcctgagtctgttcctgcttatattcaatctctcccggtgaacaggaaggaagaagatcctcgcagcggatctttccgagaggggaagaagcatgggctgcaagcatctcgatgattttggtatattccagtgtttttaaagctttgttattcataatgttatatcctttctatacgccttattctactctatctgagaaggaaaagaaaggcaaaaagccgggcagcaaaaagttttttcggtatgtcataaaatgttcatatatatttgataaaatgttaaggaaattctcaggcagcagccgtttttccattgtgttacggaaaagcagagttcaaaacacagggaaaaacggtgcagttacagttggagtcagagacaggagactacgtgtatggataaaaagaatgatcacaagcaggacgaatacgatttttaccgggaagtgatgaaaaagaagcctctggataaacgaaaaatcgcggtgagtgcggcaggagtggcagcaggagcggtattgttcggtgtgattgcggcatttgtatttgcaaagtcggtgccttatttccgaccggaggaagaacagccgagagtgaatatcgtggagggagcatcgacggacgggggcgaagaaaatactcctcagcaggagataccggaagaagaaagcggagatgcgccgaccgatgaaaatgatacaacagacacggagacacaaaaagagccgctgactctgcaggaatattcggatctgtatcagcagatttcagaggcagccagtgagccgaaaagttctgtagttgtggtacagggatttaccaacgatgtggactggatgaataattcctttgaagacgaaaagcaggcctccggctttctggtggcagatacgggaaaagaatattacgtgctgacagaataccgggtggtggatacggtggaccggattcttgtgaccttctgtgatggcaatacggtagacgggcattttctcaaacaggatgaggctaccggacttgcagtgatcaagatttccagaaatgatctcagcaaagagacaagagatgtgattgcagtgggtgaactgggaagcgcatcttcggtgaatcagggagatctggtactggcactgggaagtccgtccggttatccggattcggtagtctgcggccgggtgacttccacaacaaatgtgaaaagtacggtggacagtgaatatcatctgcttacgacggatattatgggaaacagcgagggaagcggggttctggtcaatctggacggaaagatcgtgggtgtgatcgcgcagtctttttccggggaggcggataccggggtggtgacggcattatcaatctcggatcttcgaaaattgattgagcaactgtcaaataatgaagatctgatatacctcggtgtccggggacaggatatcagcagcagtctcgcacagaaaaccggaattcctacaggtatttatgtaaactccgtggaggaagattctccggcgatgaacgctgggatccagaacggagatgtgatcgtgaaagtgggaaatgaaagtgtcgagacgctgtcgagactgcgaacacgcctggatcagtcgaaaaaggatcagaagatcaaagtgacggcgatgcgaaaaggtgcggaaggatatgtggaaatagtgtttgacgtaacgctggatgcgttataaactataaaagagtctgtaaaaaagaatagtgagataaaaaatgtggtatagggacgatggctttctataccacaaaacttctgcggagttttcactgacagaaaatcaggcagaaagacggaaggagattatatgaaatttattcaggaattttttgagggatgccgggtgtccggaatttacctttgcaaacataaacaggcagcagtgacaaaaaacggaaaaccatatgaaaatgtgattctgcaggacaagaccgggacaatcgatgccaagatctgggatccgaattcgctggggattgatgattttgaaacactggattatattgaaatcatgggagatgtcaccaattttgcgggtgcactgcagctgaacatcaagcgtgcaagaaaagcccgtgagggagagtacgatcccaccgattatcttccggtgagcaaatgtgatatcgacgagatgtacggagaactgatggcgattatcaaaaccatccaaaatccatacctgtcccgtctgttagaactgttttttgtggaggatgaagcattcatcaaacgcttccgcttcaattccgcagccaagacagtacaccacggttttgtgggcggactgttggagcatacgttaaatgtgaccaaactctgcgatttttatacgaaagcctaccctgcactgaaccgcgacctgcttctgaccgcagcaatctttcatgatatcggaaagacgaaagaaatttctgcatttccgatgaatgattataccgatgatggacagttgctgggccatattatgattggagcggagatgctccacgatgcgatccgtgagatcccggatttcccggcaaaagtggagagtgagttaaagcactgcatcctggcgcaccatggagaactggaatacggttccccgaagaaaccggcactgatggaggcggcagcgctgaatatggcagacaacacggatgccaagatggaaacatttaccgagcttttcgacaatgcgaaagatccgaacgaatggcttggctacaaccggctgtttgaatcaaatatccgtaaaaccagtatgtaaagaaagggcagatccatggaatacaaaaagaatgatcttctgactgtaaccatcgaggatatggggcatgacggggaaggaatcggaaaagtggacggttataccgtatttgtaaaagacacagtgatcggcgataaagtacaggcaaagatcatgaaggcgaagaaaaattacggttatgccagactggtggagatcatggagccgtcgaaagaccgggtcgagccacgctgtgcgtacgcccgtcagtgcggcggctgccagatccaggcactttcttatgaaaaacagctggcatacaaacagcagaagattgaaaataatctgatccggatcggcggttttcagaaagaagagattccgatgcagccgatcatcggcatggaagatccgtaccattacagaaacaaagcgcagtttccggtgggatgcgacaaagaaggccatctgatcgccggattctatgccggaagaactcactcgatcatcagtaacaggaagtgctatctaggcgtggaggtcaacgaacagatcctgaatctggtgctggcgcatatggaagcatatgatattccggcatatgacgagataaccgggaagggtctggtgcgtcatgtactgatccgttatggattccagtcgaaagagatcatggtctgtcttgtcgtcaatggcagccgcatcccgggagcggaagatctgatcgcaaaacttcgcgagattccgggaatgaccagcatttccctgaacatcaaccgggaaaagacgaacgtgattctgggaagaaaagggaaacttttatggggccaggaatatatcaccgataccatcggaccgatcgcctatcagatttctccgcagtctttttatcaggtcaatccggtgcagacacagaaactttacgaaaaagcactggaatacgcaggtctggaaggaaatgagacggtctgggatctctactgcggaatcggaacaatttctctcttcctcgcccagaaagcaaaacaggtctatggtgtggaaattgtcccggctgccatcgaggatgcaaaacgaaatgcaacgctgaatcatatcaccaatgcagaattctttgtaggaaaagcggaagaagtgttgccggaaaaatacgaaaaagaaggcatctatgcggatgtgatcgtggtggatccgccacggaaaggatgcgaagagagcgtactggctacgatggtaaagatgcagccgaaacggatcgtgtacgtaagttgtgactctgcgactctggcccgggatctgaaatatctgcggggggaaggatatgaagttaagaaggtgcagggggtggatcagtttcctcatacggtgcatgtcgagacggtagttcttttgtcccacaaaaaagccgacagttatatccacattgatgtggagtttggagagggcgagggcaagattccggtagatagtattgctaaaagagccgaagcgtacaagcccaaagaaaaagtgacctataaaatgattaaggagtacatagaagcgaaatacggcttcaaggtacataccgcatatatcgcagaggtaaagcgaaatttgggattgccgatgtatgatgctcctaatgcggtagaagaattgaaacagccgaggaaacatccgacaccagaaaaggtagaagcaatcaaagatgcacttcgttattttgcagtgatataaaactttacttacaatcgaatatttcttacatagccgtttattcatttatttgagtaagcggcttttttcatccctatttgtcggaatagggatattttttgtagaaggaggaggtttatttgaacacgcaaatcatcgccattgccaaccagaaaggcggcgttggcaaaacaacaacctgtgcgaacttgggaataggtctggcacaggccggaaagaaagtgcttctgatcgacggggacccgcaaggaagcctgacaatcagcttgggaaatccgcaaccagacaagctgccatttacactgtcggatgcaatgggcaaaattctgatggatcagcctatacgccccggagaaggtattctgcatcatgcagaaggcgttgacctgatgcctgcggatattcagctttccggtatggaggtttctttggtaaacgccatgagccgtgaaacgattttacggcaatatctggacacactgaagggacaatattcccatatcctgattgactgtcagccctcgttgggaatgcttacggtcaatgcgctggcggctgcgaacaggatcataattcccgttcaggcagagtatctgcccgccaaagggctggaacagcttctatctacggtcagtaaggtgaaacggcagatcaatccaaagctccagattgacggtatcctgctgacgatggtggataaccgcaccaactttgccaaagagattgctgctttgctgcgggacacctatggaagtaaaatcaaagtctttggaacggaaatcccccattctgtccgggcaaaggaaattagcgcagagggaaaaagtattttcgcccatgaccctggcggcaaggtggcagaggggtatcgaaatctgacgaaggaggtgttgaaacttgaaaagcagcgcgaaaaaaatagagctggcatcggtagatgacctgttttccaccgaggaaagccgtgccgatgcacagcgggaacgggtgctggaaattcccttgtctgagctgcacccttttaagaaccatccgttcaaagtcaaggatgatgaagccatgctggaaactgcggacagtatcaagcagtatggtgtgctggttcctgcgattgcccgccctgacccggagggtggttatgaactggtagccggacacagacggcacagagcaagtgaactggcagaaaaagagaccatgccggtaattgtccgtgatctggatgatgacgctgccacaattattatggttgacagcaacctgcaacgagaaagcctgcttccaagtgagagggcctttgcctataaaatgaagttggaggctatgaagcaccagggagagcgagtggatttaacttgtgcccaagttgggcacaagtccgatggtagaaaatccagagatattttagctgaacaggttggacagagtaagaatcaaattcagagatttatccgtctgactgagctgattcccgaactgctggacatggtggatgaaaagaaaattgccttaaatcccgcctatgagctgtcctttctcaaaaaggaggaaatcctccgcttgaaccggaaacgggcgagaatggggcaaatacagagccacaggaggcagaggacgaaccggaagacaaagtcattattccacagggaaaaatgaaagtgacggtcatttgtgacggctcactcaatatcagacgttccgcagcgtgggggaatgagaacatctgcggtcgtgctatcagaggacagtcatattatgtgaaagagattcatgttgtggacggaaagaagatggtcagaacaatcggcgacctttacctctccggagaatcagagcatgtacagtttgaacagttataagagcatacagacaaaaaaagaggacggcatccggaaacgggtgtcgtccttgtgttataatggatttatgaacgtgcttgaattttggcaatcaacgcatcctgcaaaacttttgaatagttgataccgtaattttcacatgcagtattgagccatgcaggaatactcaaagttttcttaaccgctttgtcattgtacgcacgggcgtattcgtcgaggttgacacaaatcaaattgacaagtgctgcatcctcgtccttttcaactgcatcaagaggggtcggagcgggaagaacatcaccatcacgcaaggatgtgaataaatactgaccgcaagcctcttgagccattgcgaaagcgtccgcaaggttatctccgtaagttgctaaatcattgaggtcggggaaaataactgaatatctcccgtcgccctccggataaaaaacagcaggataaatataattcatgataacgctcctttctttaatgggtggcaggtctcatttgagacccgcctgtttgagtatggagttgacaaccctttgaggaatgtcgcctcgatgatttgggattgtaacttttcccgttttggttgggtgtttgtattggtgatgtgaacctctcacatctactaactcccatccgtcattgaggactattttttcaatttctcgaaatctcatttgtattgtttcctccttacaagtatataataacacgcattttacgtaatgtcaataaaaatatacgtaaaatacgtaaaaatagcagagattttcatactactaaattgaacctaccgacaggcaatctggactccaaaacgagtcaggatgtattgggacttttaaaagtcaccagtaagcgttttcatcaaacgattgtaatgattactcacaatgaggagattgcccagatggctgataggattttacagattgaagacggaaaaattgtttcagacagtggtttggtatagtgagggcgattatatggtaaaagtagagaataaagaaacgttacgattattgacgaaacgttttatgaaaatgaaccgagcaagaaatattattgctgttattgcaattatgttgacatcactgttatttacaagcctctttgtggggagcgtatccatgatactttccaaaagagcaacggaaattaagcaatttatggattcatcccatgctattgcgcaaaatttgtcagaagaagatgcggagagattgcaaaaaataatagaacaaagtgatgaggtggaacgatatggaacaggcatttttctgggagcaggaagagataaacattttggcttttcagtagaagttagatatgcagataaaaatatggcagaaagctttaattgtctgccaactacaggaagactgccagagaaggaaaatgaagtagcagtcagcaacttggtactggaagcactgggagttacaccaaagattggggaagaagtcacgctgacgtgggaagtaaatccaatgctgaaacaatacaaaacagatacattccagatatgtggattttggcagggtgataaggctgttttaggtcagatggtctgggtatctgaagcctatgcgaaggagaattgttattctgttacacagaaagaattagaaaatggtatctataatgggggaaaggagtattctgtctggtacaagaatctttggaatctggaaaagaaaacagaaaatatatctaagacagcaggatttacgaaatcagggacaggattggagatcaatccggcatataatctttttgaagaggattcattttcattcacttcccttattgtaatggtactgtttgtgatattggctggttacttaattatttataatatttttaatatatccgtgaaaacggatattagagcttacggattattgaagaacgtgggaacaacaggaaaacaattgaaaaaaattgtacgtatgcaggcatggaaattgtcagcagtggggattccaatcggattgatcttcggttatcttgcaggtctttgtatggctccgtccttgactgcagatgcccaaattagtgcacaggcaggaaaaacggctcagacagtagtatcagcaaatcctttgattttccttgcagcgatacttttaacgcttttaacggtgtatctctccagtctgcaggcttgtaaaatggtggaaagagtttcgcctgtggaagctctgcgtttggcagaaggagagcagtcacataggaaaataaaaaagaatacttctgtaacctggtgggggatggcagttcaaaatgtgttacgaaattggaaaaagggattgattgttatgctttctatcgctctttctatggtagttgtcaactgtatcgtgatgttggtgcagggatatgattttgattcttaccgaaaagtggttttagcttccgattttcaactggatcagatgaccgacactttatcgaatacaaatttcaacggtattacacctgaaatcaaagagattctgaataagtgtccggaaagtgagaaaacaggatatgtgtattattcggaagaaagacataagatggaaccggcacttttgaaaacgtgggagacattggcagaaaaaaacaaagaaaactggacagattatgaaaagcaaatctgggaggaaacaaaagcggataatactgtaaaggttcatttcctcggaattagtgaaacggtgtttgatatgttagaatggaaaggggaaaaatgttcctgggatacgtttaaaagtggggattatgtgattgtggactatagtgataaatacacagaacaaccagtttcttattatcagtctggcgaaacttttaaaatggagtacggaaacggaaagcagaaagattatggggtgatcggagaagctatgatgccatattccctggattatccgtatgcagattctgtttatattacagtaatggtcccagaagaagagtatatcacccagacagaaaatcaatcagcaatgtatgctgccatcgatgccaagaagggagaggataagcaagtaaaagaatacattgataaaaatgttttgaaagaaaatgatatgataaatgttttttctgtattggatatggaggagagttttcagcagtttgtcagcaaatattatatgatcggtagttttcttgtcgttattttagcctttattggcattatgaatttctttaatacaacagcaacttctgtaattagcagaaaaaaagaactggcacttttggaagttgttggaatgacgaaaaaacagatatcaaaaatgctagtggctgagggattcctatatttgggaggcgcatttatgattgcagtattgttagttgtggttggagcaaagcagattttaataaatacgcttggtacggcatttttcttccggctgcatcttacgatagtgccatgtgtgcttatgattccaattttggttgggattgcgtatgtgataccaaagtatcagtttgaaaagatgagtcgggaaagtgttgttgaaagaattcgcaaggaatagaaacaaggtatcaattaggcgtatggatttgctgatccatgcgcctcttttttaaggaaattataattccatatcatgtgacattttcttggatcgaacaggctgattttgtcgcatctcctgtttcctctgatattcaagttcccatgcacgatgggagaaaacatgggattcaaaatactggttttatccttttgcacattcagttctttccgttccgtaactttagctttgagtttctttttaacggtgttgtatttattcagtattggattaaaatgattcatccagtcatattgtgcgtacgttcttcatgtactcttgttgtgatttcattgttttttatcgtataatatggatactggaggtggtttggatgaaatacaagattttagttgtcgatgatgataaagaattggtgaaaatgctttgtagttattttaatatgaaacaatatgaaaccattacggctacagacggaatggaagcattaaataaaataaaaatgaaaccggatattattttgttggatatcaatatgccacgcatggatgggattgaagtatgtcgtctgatacgcagtaaagtgttatgcccgattttgtttctaacagcaagagttgatgaagatgataaaattaatgggttgctttcgggtggggatgactatattacgaaaccatttagtcttcgggagttggaagcaaggattgtcacaaacataaagagagaagaaaggcatcaacaaaaaacggaataccgtttcatggatgaaatgctgattgattattctgaaaaaatagtagctatagccggacacaggatggagttcacaaaaattgaatatcagattattgaattcttatccatgcatccagggcaggtgtttgataaagaacgtatatatgcacaagtctgtggatatgatgcggaaggggacagtagaacgataacggaattagtacggcgtataaggaaaaaaatagcggattattcagaaaaagaatacatagaaactgtatgggggattggatatcgatggaaaaaataagaaacttgtcactgaaaaaaacaattctgctttattttgtgatcagcttaacggcagcatttctgttatctggatttacagttcattttgcaggaaatatgcagaataaaatatgggaaaaatatattgattatgcagattatacggacgtgtttcagcaatatggaaagaaatacgagattgagatatcaagacctaatcaatcgcagatgaatcgtttggactatcatctttcggaaatgtgtgactttatggaaacatattcggtactgattttttcgattgttgggagtgttgttgcggtattctttttttataaaaataagttaaagacacctctacaggaactaaaagatgtctcacaaatgattgcagataatgaactggattttcatgtgtcctatgaaaataaagatgagatgggaactttgtgtaaagaatttgaaatgatgcgaagtgatttagcagataacaacagaaagatgtggcgaatgattgatgacgagaaggctttgcggaatgcaattgcacatgatatacgttctccactttccatattgcgtgggtatcaggaaatgctcttagagtttgtttctgccgagagtataaaaacagaggatgttattgatatcttacaaacaggcatgtatcagattgaccgtatagagcatttcacggaaaacatgagaaaaatgtcccatttagaacagagggaactgcaatgctcagagatagagttatcggaactggcaaaaaagattgaggcagaagctgccatgctgtccaagaaggaaagtaaattatgtaaggtagaaagagtgcaggaacaaaacattgtgaaagtggatgaggaacttgtcatggaagtgacagacaacttactggaaaatgcggttcgatatgcacaaaaaagtattgctttgcagataaagaaaaaggatggttttcttataatttctgttgaagatgatggaataggatttgtggatactgaggaaaaagtaacagagccattttatcataagaatccacaagatgatttaaagcattttggccttggtatgtatatttctcgtattttctgtgaaaagcatggaggaaatttgaaaatatataatgccagacaaggcggtgctcatgtagaagctcttttcaaagctgaataaaaatactttataaggctgaaatcacaaataaagtggttttagtcttttttgttgtgaatttattgagaattgatttgtatgatgttgttaaagaaataaagaaaggaagagatacaatgaaaacaatcataaaaagaagtatacttgattatttaaagaaccctgttttgtggattggcttgattattatagttgccagtatgtatcaatgtctgtcatcgtatttgcaaattcattatatcaaacagaatgaacagatcacacaaaatgacgtagcattggaagatgctgatgtcatggatgggtacattcccacatctgatgataaagaaagaagaagggagtgggaagatacgatcaaagagacgttaatggacacctccaaaaatggttttggatttagcaggcaggaagcagatcatgtaatgaaagaaattcagaatatggatgtaaagactgcttctgagtttttggaatcccaatatggctattataatgcaatatatgcttatgaggaccttgaaattcataaggggacagcagaagaaatcaatcattatatcgagcggaaattatccgaacattctttttcctggtactttgccaaaaaaattacggattttgcaggattgcatatggccttttttgcaacagtcttgctatcatttttatttattcaggatacacgaaaaagtacctatgaattattacatacaaagcctgttacggcaatccaatatatatgtgggaaagtaataagcggattcattagtatgctgggagtattagtgattttgaatgttatattctttatgctgtgtttgaaaacgtctttagaatcgggctttccagtaacaccaattgatttttgcgtgaattctctgatctatattgttccgaatcttttgatgatatgttgtgtctatacaattacagcattaatatttaaaaatccgcttccggcagcaccaatcttgtttttacacattatatattcaaatatgctgaccatgaagaatgatatttattatatgagaccgttctctattatggtgcgattccctggcagattttttgaaacacatgtagccaaaatgtcaaacataaatcagattatgcttgtgatctcatctgttatattagtatgtatttctgttacaatctggaaaaggaggagggttcattgaaaacggaactaaaaaactgcctgtcgttatataagattttttattcatgtgcatttatactgatattgtgtgctattcatccgattatatactatgaagaaatcggttcagcgattcagtctccaatagcatttttaacaattattttttgtagtgacacatatttgatggaagtaaaaagtaagcgtgccgatgtatttcatttgtatgatcaaaaaaagcagttaaaagtaatatcacagagagtgtgcgttcaaatattatatttattaatactttcctgtgttggatatgttttgtttttctggcaaaaaccgggcagtgtaaacgaaggcgtttcgggcactcagatattccttttattttccattgcaatgttcggaaccatctggctttggagtatatgctctgtgattttgtgtacattgcttggaaatatgtgggcaggtataggatgtttatttggaattgtcattggacttatatcaaaagcgggaagttcatttttcggaaatctgggattgttttctttcagcttttgtgaacctactcaattaatgtccgagagttggatttatggaacgcttgtgtcttttatagtgggtctgcttttatttgcagtattaccaatggctttaaagaaaaggggatagattatgagtattagaataaatgatttaacagttagatttaaaaatggtgtagttgcagtaaataaggcatctcttgaaatacctaagggaatttacggactttcgggagagaatggtgctggaaaaaccactttgatgagggttcttacaactgttttaaaacaaacggaaggaatggtttcccttgatggaattctgtataacgagggaaattatgaaaaaatacagaaaaagattggttatcttccacaggaaatcgacttatatccgaatcttacggtgaaagaatgccttgtatatatgggtggactatcaggagtatccacaaatgacctcaaacaaagaattacctattatttggaaaagacttctcttacagagcatcagaataaaaaaatgcggcaattatctggtggtatgaagagacgtgtcggactcatacaggcacttcttaataatccggattttttgattattgatgaacctaccaccgggttagatccggaagaaagaattaggatccgcaatcttttggttgatttttcaaaggatagaactgtgctgttttccactcatgtagtagaagatttagcagcaacctgtacacagcttgctattatgaaaaaaggaagttttttatattccggaagcgtgagtgggttgctggaaaatgcaaagggctgtgtttggaattgtacggtacaaaatgcagaagaagcccgtttgttagaagccaattattctatatcatctaagcagtatgtagaaaatggaattcatatgaaagtattaagcaaaggaaagccaaatgagaattgtgtcctggataatgatatcactttggaagatgcatatatttatttgacgaatagttgaatataacggcgggcaagttgcccgccgtaaattatgcttattttgttaaaagaccggatagattttttccaatgcaaaatccaatctgtggatataactcctgaatttcctgatattttgcttcaatcatttctggttcatcagcccagatcttttcatatattttgaaagctcttttaaaatgtgttttggcttgcggaagattggcagtcatcagataaatggttccaagggtttcctgtactttggcataatccagacagtcatcggaatggtattccttgatgatgccggataatttttgcaattcggagattcctctttcgggttcctgctgttctgtcaggaacattgcataattggcaatctgaggtatgctgtcatttatatgaagcgcctctttttccagttttattgttttttcaggtttggtttcaagagttgcctgaaaatccagtaatatgtggcagcgagttacagatggttttgtctctgaaagggtgatttcctgaatcattggatgcaaagtgtataacgaaaacagcgtccgttatatggaagcggtatgtatgggaacgtgaaccgaaagaaaaagaaagacggaaccttatataaggattatttctattatgtctgcaaacatcgtcgcctggtagacggtcataaatgtggatattgcaaacaatggagcgaggataagattaacaatgcagtagaagaagttattcggaagctggtgaagaatcctaaatttgaagaagcaattctgaataaaatcggttcaagaatagatacagaagaaatagaaaaagagattgaaagactggaaaaacagcacaggcagctgaccggagcaaaaggaagacttggacagcagatggatagcctggatatcatggataaattttatgagaagaaatatcaggatatggagacaaggttataccgtttgtatgatgagattgaaggcgtggagaacagtatagaagaagtaaagaatcgcctgttgaatatccagcaacagaaaatatcagaagaaaacgtctatcaatttcttttatattttgataaactatatgataagttcaccgatctggagaagaaagaatttcttaacagttttgtagaacgggtggacatttacgagcaggagcagccagatggcagattcctgaagcacataaagttccgttttccggtgtatttcggagacagagagacacaggaactttgttgggacaacgaaagtaccgttgagacttgtgttttattgtccaaactaggatcaaagctggctgattggctggctgaaaattgaagacctagacatgaaattttgcaataaaggtcaatgatcagctatatatttgtcttattattggtgtctggaatcttgctcttttctctggatgcaaccagtgccgaattgaaagctcgtgattagatggaatgggtcagattggtaaatggtattcgtaatatggcagaagagattgtgttaaaagaattggtgtatatctaaagcgtggaaatctccttcgggagctttttgctgtttataagataaattctatcggagatttattatgaaacattacttttcaagaagaataaaaaagcatataattcttttataatatatttaataaaagagggtaagaaaacggaaaataaagataaaaaaaatataacaagaaaaaaaataattaattatgtgctaaacaatcatgttacatccaaggcgggaatcgcaaaagagttaaacttgagtatgccgactgtgttagcaaatgtgaatgacttgttagaaaaaagggtgttggaagaaacaggggaatatgcttcaaccggtggaaggaaggcaaaaagtatagggattaataagtcatactgtcatgcaatgggaattttgattacagcgaatcatatagaaatggtattagtaaatcttggagatgagattataaaaaaagatcgcatccgtttaaaatttacggcagaattatcctattgtacagaggtggcacaaaaggtcaaaacttttcttgaaggcgaagtagcgaaggacacgctacttgggattggagtggcgattccaggaattattgatcagaaagaacggattgttttaaaatcccatgctttaggtatagagaactatagtctgcgctttttagagcaggcgctggaaattccagcatattttgaaaacgatgctaatgctgcaatgcttgcagaaaaaaagcaaaagtatccaaatgcgatatatctgtctttgaaccacacattaggaggtgcattctgcatagatggaaagctgtttcgagggcaaaaccagaaagcaggggagtttggtcacatgatactcgttcctggtggaagaaagtgttattgtggtaaatcaggatgtgcagatgcatattgtgctgcaagtgtactgacacaagataacaggcagtcactggatgcatttatggaaaaaattgaaagtggtaatgaaaaaattttgcagacatggaatgagtatctggatcatcttgctgttttgatatcaaatctgcgaatggcatatgatatggatatcatactaggaggtgatgtgggaggtgtattgtcagattatatgataccactgggagaaaaagtgatggcatataatggctttgagcacgatgtttcatacttgaaaaattgttcgtataagaaagaagcgtcagctgttggagccgcgaaatacttttttacaaaacatatagtagaattgtagtaactgttcacaggtaggaattttctgaactgaaaattccgtacggtatagctcccactgacagattgcaaagcgaatgtggacgttcgacttgatatgtgtgaaaaacgagaagttgtgtaaaattaaaaaaagatattatagtaaaaaacggaaagaaaacagaaactacggttttctttccgttttttttgcgtgttaattgtgaaaaatatacaaaaaatgtgttttgaaattacgaaatatataaaaatatgaaaaaacatattgacaaatcgtgtttgtatggtaataatataattactttgataaaacattttataaaacacaaaataaaacaacatgaaaaggaggaaacaattatgttacagcaggtaatgacaaatccaggagaaattattttcagagaggttccggttccggaggtaaaggaaaatcaggtgttggtaaagattatgaatattggtgtttgtggatcagatattcatgtttatcatggaaaacatccgtttacaaaatatccggtaacacagggacatgaggtttccggtgagattacagaacttgggaaaaatgtcacagagtttcatgtgggacagaaggtgacgatagagcctcaggtatattgtggacactgctatccatgtcgtcatggaaagtataatctctgtgaggaattaaaagtaatgggatttcagacgacaggaacagcatctgagtattttgcagtggatgcatctaaagtaacacctattccagaagatatgtcctatgaagaaggcgctatgatcgaacctcttgcagtggcagttcatggtgtaaaacagatgggcgatgtggctggcatgaatattgcagtccttggagcaggaccgattggaaatctcgtggcacaggcagcaaaaggaatgggggcagcgaaagtgatgatcacagatatcagtgatcttagactggcaaaggcaaaagaatgtggaattgatgtgtgtgtgaataccaaaaataaagacttcggtgcggcaatgctcgaagcatttggaccggacaaggcggatgtgatctacgactgtgccggaaacaatatcacaatgggacaggcaattaaatatgcaagaaaaggaagcacgattgtactggtggctgtttttgcaggaatggcagaagtagatcttgcagtggcaaatgaccacgaacttgacattaagagcacgatgatgtaccgccatgatgattacatagatggaatcagattggtaaatgagggcaaagttcatttgaaaccgctcatctcaaagacatttgcttttaaagattatctgaaagcataccagtatattgatgataaccgcgagacaacgatgaaagtaattatcaacgtcagtgaaaagtaaggggttcgtatggaaaataaatatggaattgtcggagttgcccatgtcgggcttccgacaaacgatttacagaaaacagttgagttttataagagtcttggatttgaagtgattatgcagtcttataatgaaaaagcaggggaaaaagtggcatttttacagataaaaaattactgtatagagacttttgaaaatgggcaggcggcaatgtcagacggtgcataccaacatgttgcacttgatgtggaggacattgaaagtatgtatcagaaaatccgcaatgaaaaatatacaattattacaggcggaatcgaagaactaccattttgggaaaatggtgtgaagttttttatgattaagggaccaaatgaggaaagaatagaattctgtcagaaactctgataaaaataggagggacatatgggaagcgaaaacaaaaatggaaaagtaccgttgatcagtaagattgcatatgggtttggtgatgttggatgcaatttcagctggatgttcgtcagtaattttctgatgatattttatacagacgtgttcggaatcagtatggcggctgtttcagcacttatgcttttttcaagattctgggatgcaatcaatgatccaatcgtcgggggacttacggataagacaaaatcgagatggggacggtaccgtccatggctgttagtagcggcaccaattacagcgattcttcttgttatgacattctgggcaagacccgactggccgcagaatggaaagatcatttatatggtaattacatattgtctgctggttttggggtatacctgtgtgaatattccgtatggaaccttgtgtggtgctatgacacaggatattgatgaacgtgcaaaaataaatacatcccgttcggttgcagcgatgattgcaattggtgtgttaaatattatcacagttccactgctcagcaaattcggcagtcatagtgcaaagacaggatatctgacggttgcggtcatatatggatgtatttttacagcctgtcatttcttctgctttgcgaagacgaaagaggcagtgatcactccggaaaaagaaaaaatttctgtaaaggttcagttgaaagcagtcatgcagaatagaccatatcttcttgcattggtaggacagatattatttggatttacattatatggtagaaacgcagatattctgtattattttacatatgtggaagggaatgcctcctactacacaacttattcgatgtgcatcattattccttctatcatcggggcagcctgttttcaaccagtattccgcaagttgaataacaaaggaagaacagcatctctctttgctttatttacaggaatttcaatgttgtctatgtttttcttcaatgccaaagaatcaccagctattttttatgcattatctggtctcacacagttttttttctctggatttaataccgcaatctatgcaattattccagactgtgtggaatatggtgagtggaaaaccggacttagaaatgatggttttcagtatgcatttatttcacttggaaataaaatcggaatggcagttggaacagcacttttagcaggattacttggaaaatatggttatattgcaaatcagacacaaaatgcaactgtactttcaattatgaaacatgcatttacgacgattccaggtgcactttggattgtgactgcggttgtattatttttctaccggttaaataaaaaacgttataacgagattgtggaggaactgaaaaatggaagaaaaagttgatatcgtggcattgggagaattgctgattgattttacggaagcaggacacagtcaggatgggaggaaattgttcgaacagaatcccggaggtgctccggcaaatcttctaaccgttgcaagccactttgggtatcacacatcttttattggaaaagttggaaacgatatgcatggtaaatttttaaagaagacattgcaaaaggaaggaatcaatacagatgctattgttgaagacccggattattttacaacgttggcatttgtggaaatcggtgaaaatggagaacgaaatttttcttttgcaagaaaaccgggtgcagatacacagctaaaaaaagaagaactggatcagacattaatttcaggttgtagagtttttcattttggatcattatcgctgacagatgaaccggcagaaagtacaacgatcgaagcggtaaaaatggcaaaagcagcgggtgtacttatttcctatgatccaaattaccgccagtctctttggaagagcaaagagtatgcagtgaaaaaaatgagatctgtcatagaattggtagatgtcatgaaggtatcggatgaagagagcactctgttgacagaggcgaaaagttgtgagcaggctgcagacaaactccttgccatgggaccaaagctggttgccattacattgggagaacagggcgttcttatggcaacaaaaagcagaaaagaaatcatcaaagcatttcagacaaatgcggtcgacacgactggggcaggtgattcattctggggaggcgtattatgcagtatcctttctatgaataagaatgttgaaaaaatggaatgggaagaaatcaaaaagtgtgctgttttgggaaatgcagttgctggattgtgtgtgcaaaagagagggggaatccctgcgattccgacgaaagaggcggtgtttgaatttatgcagaaataatgaatgtatatgaacaaactcggggctgtaaaaattcccctatttttaataatgatataagcaggaaaactttcaagattgcttctgcctgcatttttatgtaaattacgaataagttttattccctggattcttctctccacgtacataatgccgtaagcataggtatcagagatttccacttttcagtaagactatggtcatctttgtcatcatccttgtaatcaagaagatacccatcgtactggtataaacaacaatgctgttgcgtttggaagtgtattctgcaaatatcgttcccatcgtatagacgctccttatcattcaattgaccattagttaaaaaatcagtagcatggagcgttaaagattattaggatgaaaatactttctaccaaaagtgatagcaaagcaacggcgggcaatttgtccgccgtaaaattatagctgttttgttaaaaaggttgatatctgctgtccaagaaagaaaccaacctgtggatataactcttggatttcctgatattttgcctcgatcatttccggttcatcagcccagattttttcatatattttgaaagctcttttaaaatgtgttttggcttgcggaagattggcggtcatcagataaatggttccaagggtttcctgaactttggcataatccagacattcatcggaatggtattccttgatgatgccggataatttttgtaattcggagattcctctttcgggttcctgctgttctgtcaggaacattgcataattggcaatctgaggtatgctgtcatttatatgaagcaggttaaattggtcaagcagtaagaaacttttcccatgtgttcttttgcaagatcgggataaccgttcatgcggtaaagtcctccgagataggcatgaatgttggaaacaaggtgagcgttgtcagcagtgatagattctatctgagcaagtgcatctttttccagttttattgctttttcaggtttggtttcaagggctgcctgaaaatccagtaataacgcctggtcagagtcggtgccaatgctttttgtctttaacagacatttcagttcctgaatgattcccttcatacctttgtgatagttatagttatcatgtatggaaatgcattttccagaaaaagccgatactttggtatatcatctttttcaatcagactgactcatttgattacttcgctgatatgatttttaaacaagtgctaatagaagaaaaatcgcatcgattcaatagaaattcccctttcatagttaagattgagtatatctatcatagtgcgaacatatattcgatgcaagaaaatgcggatatttttaaagtgattgtgtcaatttacaatcaatttctattcaatgtggttttcaggcaggttctgtaaaataagctcagatcaaacaataacgggaggagcttatgcaacagaatattgaatttgagcggtgcattgattttctggtacggatgattgataagtacggcgaagaagtcctccgggagttggaggaagaaaaacagaataaagaagaaaaagaagcggcagtttcctgaaatacaaaatgtaaatcagactgtcgcttttttgtgaaattattcggctgcgttatcttttacttctgcaagcatataaggatcatatttacttttatgcttaaatataatataatttaagcataaaagtaaatatcaagaataaggaggacaactatgtcaacatcagatattttggaatcgctaattgaaaaagataatggatatttgattacatcgaaggccgttgaatcaggtgtatcaaagccatctgtctcaaaatacgtcagagagcatgatatggaaaaagtagcacatggcatttatatcttagataatgtgtggccagatgagttgtttgtactacagcaacgaaataagaatattatttattcgggcgagaccgccctttatttgcatggtcttattgacagagaatacagtcatatttgtttcactgttcctaccgggtataatgcaacacatatcaaaaagaaaaacaaagaagttcgttatgcaaactcagagattcttgatatggggacctgtgaaatcccgtcaagcagcggtaatttggttaaagtatatgacaaggaaagatgtatttgtgatttgattaaaggtcgaaagaaatatgaaattcagttatatcagacagcaatcaaggaatatatgtcctcgaaggaaaagaatctttcaagattgattgaatatgcggttaaacttggagtaagggatgaagtgatgatgtatgtggaggtaatggtatgattcatacagcgaaacaacttaaagacaaagtaaaaaacatgtccggcgggaatagtgaagttgcgcaagcattaattagaacatattttatggaaaggtttttagaaagggtgtctgtttctgaatacaggaataattttattctgaaaggcggaatgcttgttgcttctattgttggtgtagacatgagagctacaatggatatcgataccactgtgaaagcattacctcttaatgagaaggatgctagagcaatcattgagagaatcggtgagcttcagcttgaagatggggtaaaatttaagattacatcagtaaaagaaatcatggaagaatttgattatcctggcattaggatgatgatagaagctaatctggaacgaatgagacaaccttttaagatcgatatttctacggatgatgcaatcacgctaggtgcagtggagtataaatacaagcttatgtttgaagacagatcaatttcagttttgtcgtataatcttgaaactcttcttgcagaaaagatgcagacgattttggcaagaggacttgcgaataccagaatgagggatttttatgatgtatatgagattatgaattcaaaggctgatcagataagctttgatgttttgaaaaaggcatttgcggctacttgcatgaagcgtgaaacttcttttggcgaagaggaagtgagagaaaccttagacaagattaaagatgattctggactcgaagaaatgtggaatcgttttaagcgtgtaaactattttgttgatgatctttcgtggggagaagtatcggaaacaatagtagataatattgaaaaaattttttttttagcgaccaggtttcttgaatcagtgatgaaaagggaataaaaacaaaagacaggaacaagttttgaagaaatatcctctaagagatagtgaaatacctattccggaaaattggaaatcagagttccggtactcggaaatcgcctcttttgtgcttgaggacttatccatttctgctggaatattggtcaagaccttgccgcatctgcggtgcgtagcagtctttaccaatgtctcaacagaaattatgattcggtatgcacaaaaagcggatataaaaagtgatttccatatcaccggacagctgatgtaaaaccatccggaatattcactattattgaaaaatgtaccgacagtagatttttaggtgtttttggagagaaaaaagtaaatgttctgaaagtcaatttgatgttagacggtatcctgtaacgagtgctctcaaaagatgagcaaaagatttcaaacatctgctcatctttatacaatcttaatttcaaaacaaacttacttacgctcatttaatacaaataaagatagaataaaggcaatataaaaaagaaattaagattatggggatatagttatgcaacagacaaacagatcaagacatcgacatatgacatcatttcaagtgattagtttagggtttttatccgtgattctcttaggcagtctgcttttgatgctgccgattgctacaaaaagcggccagtgtacctcctttttggatgctttgtttaccgcaacttctgcggtttgtgtgacgggactggttattaatgatacggcaacctactggtctttatttggccaaggagttattttactgctgattcaaatcggaggtatgggaattattacgattgctattgcgattgctgttgtttccgggcgtaaaatcgggttgatgcagcgaagtaccatgcaagaggcaatttcggctccaacggtgggtggtattgtgcggagaacgcaatttattattcggactactattctaatcgaaatcattggtgcggctcttttagcccctgttttttgcagggattttggtttttggaaaggaatatggtattcgctgttccattctatttctgctttttgcaatgcaggatttgatctgatcggtataagaacacctttttcctcgttaacatcctattctgtacagccgattgtaaatcttgtgattatggtgctgattgttgcaggaggtattggattccttacctgggaggatataaagaatcataaatggcatttcaaaaaataccgaatgcaaagcaaggtaatttttatggtaacaggattattgatattcttaccggctctttactttttttattttgagttttcaaatgtgccactaaaggaaagagtatgggtttccttgtttcaatccgttacgccgagaactgcaggatttaatacggcagatttgactttactcagtgaagttgggcaaatgcttatcattatgctgatgctcatcggtggctcgcccggttccactgcaggtggtatgaaaacgacgactcttgcagttctcgtttcatcggcattatctgtatttagaaaaaaggaacacactcatttttttggcagacaaattccggatggcactatcagaaatgcagctacgatttttttgatgtatatcgttttattccttgttggaggaatggtaattagtagcacagaagatattccacttatgaccgctttgtttgagacggcgtcggcaattgggacggtagggttatcgctgggaataactcctggcctggggcttgtttcccatataatcttgatttgcctgatgttttttggcagagtgggaggattgaccttaatttttgccaccgtttctgaaaaaaagcctaacggttcaaaatatcctcaggaaaaaattacagtaggttaaggagaataaaaaatgaaatcaatattacttatcggtctgggaagattcggacggcatatcgctataaaattagatgaattgcatcatcaggtgatggcggtagataaagaagatactcgagttgatgctgtacttccctttgtaaccaacgctcagattggggatgcgacgaatgaagattttttgagttcgcttggtgttgggaattttgatgtttgcattgtggctatcggagataactttcagaattcattggaagtaacgtcccttttgaaggaactcggtgcaagaatggtggtgtctcgtgccgctcgtgatgttcatgcaaaatttcttttacgaaacggcgcagatgaaattgtttatcccgaaaggcagcttgccgattgggttgcgatccgttatagtgctgatcatattttagattacatagaactagatgaaggacatgcaatctttgaaatatctataccgggagaatggataggaaaaacaatcggtcagttggatatacgaaaaaaatataacatcaatattatggcactgaaaacaaatgatattatgaatttgaaaataacttccgatacgcagttgttaaagggcagtaccatgcttgttcttggggagacgaaacatattcaaaaatgttttcatatttaatttttgaaagaagttggtgatatgaaagactttgctttacttatagtggtgttggtagtatttatttatggttattttcttatggaaaagctggatagatttctcgagggaaatctatcccaaaaacttatttcaggttctaaactcaggattggatttgaaacacctgtaatcatagattctattgcagatctattagaacaattttcaagcgaatacccaaactatgagctgaatctgttctacggttctgtaagtgaaataataaatgggctagaaaataataaacttgattttggctttatcatagaaagctccaacgatattttgaaagatgagtattgttccttatcccttcaaataaagcaaagtgtcattaatccagactctgcagacattgcggtacatcccatcaacacgattgagaaaccagcgagagtgatatggcaaaatgacattaattgtataaagagtctatttgtcgaaaaattgcgtgatttttcggagcgttttccgctttcggctacacgcccgaatggaaaaaaagaagaaaaggtgttataatctttatgcgattttaatgtcagtgctaaaatacttttctgaaatttacgtattattctagataatggttttgtacaaggagatgaccgtatgggtgaaagcagacacaatccggatcagttattaaaggaaattcaagcggatgaagaaaaccgtaataaaggacttttgaaaatctttttcggatacgcagctggtgtgggtaaaacctacgccatgttagaagcggctcatatggaaaaacagcagggaattgacgtggtagccggttatatagaacctcatgcacgcccaaagacagcagctcttttgaatggcttagaagttcttcctacaagagaagttctctataatggtatgatacggaacgaattcgacattgacatggcgctgaaaagaaaaccacagattattcttgtagacgaacttgcgcatacgaatgccgaaggatgccgtcatgcaaaacggtatcaggacattaaggaacttttgaatgcagggattgatgtctatacgactgtcaatgttcagcatattgaaagcctttgtgatacagttgcatccattacggaaattgttgtacgggaacgcatcccggattctatttttgataatgcagatcaggttgaattaatagatattgagccacaggatttgatcaaccgtttgaatacaggaaatgtatacagacagacacaggaaaaccaggcagtagaaaatttttttacaatagaaaagttgacagctctccgggagatttcactgcggcgatgtgcggaccgggtgaatatcctcacagaaaatacccgcataaaaaatcatggagattatcacacaggcgaacatattcttgtatgtctatcttcttctccatccaatgcgaaaattatccgtaccgccgcaaaaatggcttctgcttttaaaggggagtttacggctctgtttgtagaaacccccgatttttcggtgatgagcgaggaaaatgtaaaacgcctgcgttcaaatattcgtcttgcagagcagcttggggcaaaaatagaaacagtttacggagaagatgtttcatttcagattgcggaattcacccgtttgtccggtgtgtcaaagattgtgatcggacgtagttctgctacaaaacggcatttgctcagcaaaccgaccctgacagaaaaattgattgattatgctcctaacctggatgtgcatattattccggatacggtttctaatgcggcagtgtatcagttaagagagggcaggaaaaagaaccatatcgtattctctgtcactgatacattaaaatctacttcgatcctgattttatccagtttagtcggaatgattttccagaaatttggatttgacgaagcaaatatcattactgtttttgttttaggagttcttgccaccgctgtcatcacgaaccatcagatatacagcctaatttcctcgattgtaagtgttttggtctttaatttcctgtttacggaacctcaatttaccttgcaggcgtatgatcagggttatcctgttacctttattatcatgtttttggcggcatttttaactggttctcttgctatacggattaaaaaccaggcaaaacaggcggcacaatctgcttaccgtaccaaagtgttatttgacacaaaccagctattgcaacaggcaaaagataaaaatgaaattgtatctgcaacttcaaatcagctcattaaactcttgggaaaagatatcgttttttatttagctgatggagaagtgttggatacgccgcatattttttctgtaactgaggaaaatttggaatcgtgtatttccgaaaatgaaaaggccgttgccggctgggtattgaaaaacaataaacgtgccggagctacaacaggaacgctttccaatgcaaaatgcctgtaccttgctgttcgcagcagtatggtatatggagttgttggaatcgtgatgggggaaatacctcttgatccatttgaaaacagtattctactgtccattctcggagaatgtgccctggctttggaaaatgagaaaaatgcccgtgagaaacaggaggcggctatccttgcaaaaaatgaacagttgcgagcgaacctgctgcgtgctatttcacatgatttgaggacaccgctgacatccatttccggtaatgctagcaaccttttatccaacggcgattcctttgataatgatacaaaaaagcagctatacatggatatttatgatgattccatgtggctgattaaccttgtagaaaacctgctggctgtaacccggattgaagaaggacggttgaatctccatataacggaagatttgatggaggacgtgatcacagaagcgttacatcatattaaccgaaagagtgaagaacatcatatttccgttgaaagcaaagaagaatttcttcttgcaaaaatggatgcaaggcttattgttcaggtaatcatcaatattgttgataatgctatcaaatatacacctaaaaactctcatattgttattcggacagaaaagaggggaaaacaagcaatcgtatctatatcggatgacggaaacggaattgctgacgaaataaagccacggatattcgacatgttctacagcggtgcaaatcaaattgcagacagccgccgaagtttaggacttggattatctttgtgcaagtccattattaacgcccacggcggagaacttactgtttcagataatctgccgcacggaacagtattcacatttacattaccggcaggggaggtcaaagtatatgaataagttactaatattagttgtagaagatgacacatcagtcagaaatttaattacaacaaccttgaaagcgcacgaataccgatatctgacggcgcccaatggtcaatcggcaattttagaagcatcttcacacaatcctgacattgttttacttgatttaggacttcctgatatggatggtgttgagattattaaaaaaattcgtacttggtcgaacatgccaattatcgtaatcagtgctcgcagtgaagataccgataaaattgacgcgttggatgccggtgcagatgattatttaacaaagccattttctgttgaggaactgcttgccagactacgagtcacgcaaagaaggttatcgatgatgcaaaaagtatcccctgccgaagcgattgtttttgtaaacggaaaacttcgtgtagattatgttgcaggttgtgcctatttgaatgaagaagagttacatttaacacctattgaatataagttgctttgcctgttgacaagaaatataggaaaagttctgacacatactttccttacgcaaagtatttggggaagtagttgggataatgatattgcctcccttcgtgtgtttatggcgacacttcgtaaaaaaatcgagaaagaaccgaactctccacaatacatccaaacacacattggcgtggggtatcggatgttgaaagttgagtgaacttcacaacaccatagttaaagttgtggctatgggagcggggacaatggtgccggatgaactgattcctcgctgccctcattgtggtgcggaaatgtttccgtgggtaagaggatatgggaattttctacaagggaaaaaatacgaagaagaatatgagaaaatctcaaaatacattcaaaagaacaaagatagaaaaattctcctgatagaacttggagtagggcgtatgacaccgatgtttatacaggaaccgttttgggaactgacaaacagcttgaaagatgcatattatatttccgtaaattcagaatatcagtttttgccggaattcattgaagataaggggattgctattttgggagatataggaacagtgttaaaagatttgcagaaagcaaaagaggaaagtgcatttgtataggatacttgttcttgatattccacttgatggagaaacattagaatattgattgatacaaaactgcactcagggatattgtgggtgcagttttgcattaaaattattgattacgatacagtttctgatatcaggatgattttgcaaaagcaataagagtgtcagtcaaccacaagggggacagcgattcgacaggagcaatttgcggaaatttatcacaaaatgtttcttgcctatttctcttgtcatataatgttttgcaaatcgttttgcatggatgttcgctgataatagatatttatgatatcctgtaaagtaatcgtattcattttttcttcagcatttttttggatttcattatagaatccctgcaaagacaactgaatattaatgccaacgccgcaatcagggttggtatgagtatctaaatgaagcagtggtttctcgccttcaactgctttatagacatccagcaatgtgatctggtctgctggttttgaaagagagggacgggcatgtccggcgacactggtcataagtccggctttttttagttttaacataagctggcgtacaaatccgggatttgtatggacactttctgcaattgaggcactggagagagatttttccttgttgatggcaatcagaaccatcacatgaacagtatcgcttaattttgttgagtatttcatgataagaaactccttgtagtatgatataataattttattttcaaatttttgagacaaaatattgctggtttgtcaaaaacatctcaagttcttaacagttcacttttacatgtgtcgagaacttgttcatattatttttgttgacgattgtaaataataaaattaaaacaataatgaaatttaaaggaaaagtcaacatagtaataaaacttacggaggattgtataatatgctgattgtggacaagttaaaaggaaatttatataccagaatcaaaaaacatatgactaaaaaaatgtatcacctttattatcgtgaaaacagggaagcttcacagtctaaagaagaatatgaagcaaatttattaagagcataccgacatttagacgcatgcagattcaaaaataagggatggccatgtccaacatgcccaagttgctgtttttgtggaaaagattatgaaactatgactgaggtaatggattttgcccgggaatggatgaaagagaatccggacaaagccagatttatgaaaccacccaaattcttgcataaacattgattattatatgatgcgataaaatgttcgcaaaggagaagttatggaatacaaaaatcaaacagaaaatcgtgcatttcaggaaatgctgctggcagcagtaaaacggttacaaaatcgttctggagaggagattgctgcaaaaagtggggctgtttttcatagcagccgaaatgtacttgagataatgagtttttatgaaacgattgaaattcaacttcctgaattctatattaactcagacatagatgaatggcattatctgacgttgttgcattatctggatatggccgatggcacagaagactcacagaagctcattacttttggtaacctgaaagatggattgatacggggaaccaagtttgaccggacagcagagcagaaactggaaaaactcttacagggcaaagatcctgaaaaaattaaaaaagcatgtaaaagcctaggtgcagaattcacagagacaacggcggatctgtgtgctgtttttccagttctgccaagatatccggtaactttaaagatatggtttgcggatgaagaatttcctgcatcgggaaaactatttcttcaggatcatgccgatcattatctgagtgtagaagatgcggtaacagttggagaaattttgttgcaaaaattatcggaagcattttcttccctctgatcatgaatcagaaaactttccagtccggctttgataaatttgtcaattgttgtctggatctgttgccagtcattacagtgattgcggagcatcagtctgttgatggaaaggcagccattcatttgaaaataaaaaaccgattctgcctgttcaaaggtcaggaggctgtgtgacataagccaggtcacatagccttcttttgcattttctgctaatttttccagaagaataggggcaattgtatcatccagaaacagtgccctgtattgtgattccatctgtattttctgacagaacggataggaacagtttttttgatttggacagaataaatgatccacagttgttaacatatcctgagtcatatcattaagaatatctgataatacatcatagatatcgtagtaatgaagataaaaagtgccacggttgatttcagcatttttgcagatctctgtaactgtaattttcgtaaaacttttctgatttaacaattctaagaacgtatcttttatggtctgcctggtatagcgggtacggcgatcttgttttctcgttttttctgacattatatactcctgtattagagcgtgtctgaaaaatcatttccgcaatctgcaagccccactttgcggtatattttaccctcattcggttgccgtagcccgctacgccgccctcattcggataaaatctcccacaaactgggactcgcagctcacgaaaagcctttttcaaacatgctctagttagtatcatatgatttctcaacaatttttctgatgtgttgagtaaccatacaaatctcacagactgattattgtaattcatatagtaacaactataatgaggtttaaagaaaaagtcaacagattgttcagaaatttaggaggaaaaatatgggacatgtaattgcagtatcgggaaaaggcggtgtagggaaaacaactctttgtggattgttaatccagtatttatgtgaaagcggaaaacgtccggtcctggcggtggatgcagatgcgaatgcaaatttgaacgaagtgctcggtgttgagccggagatcacacttggggagctgagagaagagattgaacgtgcaggcgtagacccacgatatcagattccggcaggtatgacaaaacaggcttatctggaaatgcgtctttccgatgcaattgcagaagaagacgattatgatttgatggtaatggggcgatctcagggacagggctgctattgctttgtaaatggtcttgtgcagactcaggttcagaaactgcaaagtcattatccatatattgtggttgataacgaagcaggtatggaacatatcagcagaggaatccttccaaagatggaagttgcgattcttgtaagtgactgttccagaagaggtgttcaggcagccggacgtattgcaaaactgatgaaggagttaaactttaaaccacagaaaaccggattaatcgtaaatcgtgttccggatggaaaactggatgccggaactctggaagaaatccgaaatcagggactggaactgttaggggttgtaccacatgatgatcaggtatatcagtatgactgtgatggaaagccgatcatacggcttccgaaagattctcctgtaagaagtgcactgggagaaattataaagaagttaggattgtgagttggaggattaaaagtatgaagattacagtatgtggcaaaggcggctgtggaaaaagtacagtaaccagtcttttgtctaaggctttagccagacgaggaaaagaaactttggtaattgattccgatgaatctaattatggtctacaccgacagctgggtatgaagcttcccagagattttacagactatttcgggggtaagcaaaatgttttgaatgatatgatgttatcaaaatttactcatcagttttttgaggaaacctggactatagatgatataccggaagattattatagtctgaaggacggtgtaaaactgatgaccagtggaaaaattcatcaggcaaatgaagggtgttcttgtgctatgggaactgttatgactcaatttatccaaaatctcaggcttacagaagaccaatttgcgctaatggatatggaggctggtattgaacactttggacgtggaattgataacggtgtagatttgatattgataatcatagatccatcctatgaatccctacagctttccaaaaaaatcggggaattatcggaaagtattcaaaaaccattttattacgttctcaataaagtaacaaaagaaaatcaggaaatgatgtatgaagctgtatggaattcaagtcgagtcgctgtatctcttagtgcggatcctagcattatgggagagggactgatggggaaagaactatcagaaaaaccagatgctattgaaaacttaacagaatttctactttctatttaacagaataaggagatttaggtggatataggataaaagaaaaccagattacacagctgtaatttgtaaaattacattatcttgacgcaagaaaaaagcagtgatataatcccgtctttgacaggtaaaaaaataaaaactgctgtaagtccaacgtttatcggatttacagcagtttagatacgatttttaaaatatagtaatgttttcactacagataataaattgaaaaacactgtaaaattaaggaattccaatacttatcgaagaatagataagtacttataaagagaatactattttattcacgaaaggtcaattattatagacttactataatttaaaacaaattatttgacaaagaaaaagtagagtttatgcgggtttaacggactttttgatagatgcaactgtcaaactcccgggagtgaacagtaacaattgccggaaagattccggatgtaatggtttttgttgtgttgacagggtatttgagatgacgtatactgaattcagtgattgttctgtggaaacttacgaagcctgcaggcggggggaggggttgagagtctctccttctttttgttttatgaaatgctagagcgtgtctgaaaaatcatttccgcaatctgcaagccccactttgcggtatattttaccctcattcggttgccgtagcccgctacgccgccctcattcggataaaatctcccacaaactgggactcgcaactcacgaaaagcttttttcagacacgctctaggcagattccgaagaattcgtttctttcagcaaacagtttttcaggatcagtgacggaaagagaatagaataaaagacaggaaagagagggaaaagcatgaaaatttactatcagcatccacagacttggtttggcgattgtatgccttttggaaagggggatactttttacctgtttcatcagagagataccagagtgccgtgcccttttggagagccgtttggctgggatctggcaaccacaaaggattttgtgacttatgaggattgcggtgtggcgattccgagaggaacggatgaagagcaggatcagtttatctttgccggaagtatctgcgaagacagagaaggaaagtatcatgcattctacaccggttacaacagagattatccaaaacagggaaaaccatctcaggtactgatgcatgcggtcagtgaggatctgaaacactggacaaagacgcaggatgcagtgacctttgttccgcagccgggatatgatccggatgactggagagatccgtttgtactgtgggatgacgaatctgaaaaatatattctgatccttggggcacgtctggaaggagacaagcataaaacaacaggaagaaccgtttattttacatcagatgatcttgcagactgggagtttcagggggatttctgggcaccggatctgtttaccatgcatgagatgccggatcttttcaagatgggagactggtggtatctgatcacaacagaatattcccatgcatccacacaggtgtaccgtatggcaaaaagcctgaaaggaccttggatcgcaccggatgacgatgcttttgacggaagagcttattatgcaggaagaacctttatgttgaataatcagaggattctgttcggatgggttccgacacgtgccaacgagacggacagtgcaaatctctggtacagaccggaggcagataaagaagattttatctgggcaggaacttttgtcgcacatgaactgtatcagagaaaagatggcactttagggtgccggattccggatacggtatggaatgcgtttaaggatgagaaaaagctggatgatgtaaaactggaaaaagaatcaggaagagcattacggcatgtagtaacggagaccggtgactgctatcgatacgaagcagatgttacatttgctgagggaacacgtggattctccgttggcgtgcgcgcgcaggaagcggatgatgaattctattctttcacatttgagtgtccgaaggatcgtgtgatcttcgagaaatctccgaactggccatggccacagatgaataatatgggactggaacgcctgattcgtctggttcctggaaagaaatatcatgtacagattatcgtggatgatacgattgctacactgtatgtggacggagttgccctgaatacccgcatgtatacaaacccgggggaaggaatctgcctgggagttacagatggaagtgcggtatttgagaatcagagtattgcatatctataaaagggaatcgggccgccgtactgtttttggtgcggcggccctgattttatctcgttcttttcagaacacttcgcgggatattacctgccggacagttacaatattttaaaagagaaacgatgtactggtgattcgaggataagtataattcacaaaatggggtctgaaaaaaacaggctccattttgcaattgtttactgatgaaaagaaaaaagtatgttataataaaaagaatactgtaaaaaaagaaatgcaataaggagatggaaatccatgaaagtatctatgtgtaaaaccatgcggacttatgagtggaaaaatctgtcgaaagatcttctggcgggtctggtgatcatggcagtgtcgattccaatatccatgggatatgcgcagatcgcggggcttccggcggtgtatggactgtacggctcagtttttccgatagtactgtttgccttattttctacttccccgcagtttgttttcggtgtagatgctgctccggcggcactggtaggatcggcactggtaagtctggggattgaagggggatcgaaggaagcaattgcggcagttccggtgcttgcattttttgttgctgtctggcttctggtcttttatctgtgtcgggcgggaaaactggtcaattatatttcagcaccggtgatgggcggatttatcagtggaatctgtaccacgatcattctgatgcaggtgcctaaattattcggtggtaaagcaggggtcggagaactcccggaactggtgcatcatatctgggagagtcggacgatctttcatctgccatccttgcttctgggtgttggtacactggtgattcttctggtgtcaaaaaagctgattcccaaatttccgatggcagtgtttctgatggcagcgggtgcgatcggtacggcgttttttcatctggaagatcttggtattcagacgcttgcagcagtgaaaccggggcttcccacatggacggttccggagtttggagcaatcccgttaaaagaggcggtgatcatcagtctttccgtggcagttgtcatcatggcagagacattacttgcggagaacagttttgcacagaaaaatcgttaccggatcgatgacaatcaggaaattcttgcatttgccatgggaaatctggctgcttccgttattggttgctgtccggtcaatggatccgtatcgagaacggttatgggagagcagtaccaggcgaaaactcagctgaccggtatcgtggccggactgtctatgattgtattattgctttgtggaaccggatttatcgggtatcttccgattccggtgctgacagcgattgtgatttcagcgttactgggagcgacagaatttgatctggcggtgcggctgtggaaggtgagccgcacggaatatctgatctttgctggagcatttttcggtgtactgatgcttgggactatcaacggagtattgattggaatcatcctttctttttcagagatgattatccggacatccaagccttccagaggctttcttgggattcagccgggacaccggcattttcgggatctgaaagaaagcgatcagatccatgcgattgaaggggtgttgatctaccggttcagcagcaatctgttttttgccaatattcaggtattgcaaagtgacattgaggataatctgcgggaagataccaaagcagtgattttggatgccagtggaatcggaagtatggacattacagcggcagatcggttaaaacttttatatgagtcactgaaagagaaaaatatacgtttttatatcacagaacatattgcaggattgaatgaacagatgcgtcagctgggacttggatgtttgattcaggaaggctgtgtgcgaagaacgacacatattgctttgaaagatatgggtattacccgtccgtatcccttagagggcggtgtggataatgaacagcgcagtgcgtccagaaaacgtgccgacaacagggtgcaggaatttgtctgggcgtttggaagtcaggcaggagaggagatcgaacgacagatcgggtgtcagattgaacagttgaagaaaaccggtgatgtggaatatctgcttcacggccgatggtctcatatagaggatctggatcaggatgagtggctggaacatctggaagagcatctcaaagaaattgtcaatatttccggaaaagatgaaaaaaccctggcaatccgactggaaaaacaccgtcaggaagtgcatgaccgtatcgcaagagaacatccggaacttgcagagcgtttccgggaaaggcgtcatctgttggatgaacatctgaaggaaaagagaccggaagtttatgaacttgtaattcagttgcgcaaaaagatcagcgatgagcagagagaacaagaggaacaatagttacattagagggcagtaaaagatgacagaacaaaagataaccatgacgatggagcaggtggaacaggagatggaagagtatcgcaggatttttgatgtggtgcggctcatcgaagaagaaacgatccaaatgatggaagagggcagggaggaagaagttgatcctgagaaagtggcctgctattcattctggaagaaaaacaggcaatgtaagaactgtatatctgcaagagtactcagggaaaagaaccaggggactaaactggagtttgtgggagaagatatttatcaggtaactgcctgctatatggaaatagatggaaaagcatatgtaatggaactggtgaaaaaactgaacgaagaactccttctggacgcagagggatgtgaaaaactggttcgaaaactggacggatataaccaggatctttacattgatgctctgacaggctcttacaatcgaagatattatgaggaacgactgaaaggaaaagaaacttctgccggtgtggcagttatagatctggatgattttaaactgtggaatgatacatatggacatggagcaggagatgtggtgctacagacagtggtgaaagcgatccgtcagtccacacggaaaacagacagtctggtacgctatggaggggatgaatttcttctggttatgccggatgtttccgatgaagtttttctgaaaaaactggaatatattcagaagcagatcagggacgcggatattcccggtttttccagaatgcgtctttctgtcagtatcggaggcgtgacagtccgggaagaagttatggaagaggcagtacgaaaagcagaccggctgatgtatcaggcgaaaatccagaagaatatggtggtgaccgaaagaaaatcaattgatgcggatggaatgattcatctggaagaagagataaagcggacaaaacagctgatcatgatcgtagatgattctgagataaaccgtgagatccttgcgtcgattctggaagaagattatcagatcattgaagcagaaaacggagaagactgtctgcgtcttttgcaaaagtatggaactgagatatcgttgattcttctggatattgtaatgcctggcatgaatggatttcaggttttgcatgatatgaacaaaaatcactggatcgaagatgttccggttatcatgatttccagtgaagactccgaaaagagtatacgacgggcttacgaaatgggagtatcagattatatcagccgtccattcgatggaaaggttgtctatcagagagtattcaatacaatcaagctgtatgcaaaacaaagaagactgatcacactggtaacggatcaggtttatgagaaggagaaaaacaaccggatcatggtaagtattctgagtaagatcgtagagtttcgaaatggagaaagtggactgcatgtggaacatatcaataaactgtccggtatgctcctggaacgtttggtacaaaaaaccgacaagtatcatctgacctggacggatcagtatctgatcacagttgcttctgctcttcatgatatcgggaaaatcgggatcgatgagaaaatcctgaataagccgggtaaactgacaccggaagaatttgaactgatgaaaatgcatacgatgataggggcatccatgctggaacggatggaaatatataaagaagaacggctggtgcagattgcctgtgagatctgccgctggcaccatgaacggtatgacggaagcggatacccggacggactgaagggggaagagattccgattgcagctcaggtggtttctattgtagatgtctacgatgcattgacgagcccgagagtctataaaaaagcatattctcatgagaaagcgatggagatgatcctgaccggagaatgcggtgtgtttcagcctttgcttctggattgtttttgtgatattcaggaggaagtacggaaggtgacacaggaaaaaagcgaaaaagaaggaaaaatatccggatttgaactgacagatctgaaagaaactctgaaaaacagtcatctgatcggtgatttaaaaccagaaaagaatcattgacagggtagaaaaaccggtaattatgtgataagataaatgcaacgtgttaaagtgaaaaagtgttagaggaggaatagtgttatgtatattacatgtctggatgtggaaggtgtgctggttccggagatctgggtggcatttgccgaggagagtggaattccggaactgaagaaaacaaccagagacgaaccggattatgataagctgatgaaatggagactgggtgtactgaaggagcatgggcttgggttgaaagagattcaggaaaccatcgaaaagattcagccacttccgggcgcaaaagaattcttagatgaattaagaagtttcagccaggttatcctgatcagtgatacctttgcagaatttgccagtccactgatggaaaaactgggacgtcccacattattctgcaacagtctggaagtttccgggaacggagaaatcacaggatataagatgcgtgtggaacagacaaaactgaccactgtaaaagcactgcagtctatcggatttgagacgattgccagtggagattcctataacgatctggggatgatccaggcaagcaaggcaggcttcttattccgaagcacggataagatcaaagcagagtatccccatattccggcctatgagacctatgacgaactgcttggtgctatcaaaaaagcaatggcagagtaaataaaatattaaaatcacaggatggaagcaggattttgcaagaaaaaacatattgacatagtatgtaattaataatatgatagcaatatccggttcagttgcagaagagactgagaaaagagacaacagacagctggacaggatataattgtgaccgggagtactactgcccggttataattatatttacacaggaatcggttcggtgaaccggttctgagaacgagaacagggagaatgatatgttaaatcagttttcaagaacacagctgctgctgggtgaagaagccatggaaaagctaaagaattcaagagtggctgtttttggtatcggcggtgtcggtggatatgtctgtgaggcactggtgcgaagcggtgtcggagcctttgatctgatcgatgatgataaggtatgcctgaccaatctgaaccgtcagattatcgctacgagaaaaaccgtaggaaaatataaaacggatgtgatgaaagaacggatgctggagatcaatccgaatgtggatgtgcatatccataagtgcttcttccttccggaaaatgcagatgaatttccatttgaagagtatgattatgtggtagatgcagtagacaccgtgactgcaaaaattgaactggtaatgaaatgccaggaaaaaggcgtgccgattatgagcagcatgggagccggcaataagctggatgccagccagttcaaggtggctgatatttataaaaccaaggtatgcccgttggccaaggttatgcgccgggaactgaagaaaagaagagtcagaaaattaaaggttgtttactcggaagaactgccgaaacgtccgattgaggatatgtccatcagttgcagaacaaactgcatctgcccgccgggagccgcacacaaatgtacggaacgacgagacattccgggcagtgtggcatatgtgccatcggtagcaggattgatcattgcaggagaagtcgtgaaagatctgacaaccgtgaaaaaatagaataaaagtaactattcagcagccgctgtcccgcgaggtgttttggcatgaatatgccaaaatcccgagacatacaagtcaaaatgccatcaccgaaggtgatttttaatgcattttggctcgtaactgtgaagggactgaacagttacgaataaagcggaaatcaaccggaaaggaaagacagcatatggaagaaatgattacaagagaacagatggaaaaactgaaaaaactgcaggattatttgagaagtctggaatctgttgcagtagcattttccagtggtgtagattccacatttttattaaaggtggcaaaagacacgctgggtgataaggtgatggcagtgactgcccagtcctgctctttccccaaaagagagctaaaagaagcgattgcattctgtgaaaaagaaggaatcaaacatgtgatctgtgaatctgaggaattgagtatcgagggatttgcccagaatccgaagaatcgctgctatctgtgtaaaaaggagctgtttgaaaagattcagaagatcgccgctgataacggtatgaaagccatcgtggaaggttccaatctggatgataacggagattaccgtccgggactgcaggcagtcgccgagcttggaatcaaaagtccgttacgtcactgtgatctgacaaaagcagacattcgtgcactgtcccattacttgcatctgccgacttgggagaaacagtctttcgcctgcctgtcttcccgctttgtatacggagagacgatcacagaagaaaaacttggcatggtagataaggcagaacagctgcttttggacatgggatttcatcaggtacgcgtccgcatccacggtatgatggcgcgaatcgagattgatccttccgagtttggaaaactgatggaagaggaaaaccgggaaaaaattgcaaaaacactgaaagcgtacggatttacttatgtaacgctggatctgatgggatatcgtaccggaagcatgaatgaaacattataagcatatagtacgcatattaatatagaagaaataaatacatatacagatctgagaacgataaaaagccccgacaatggagaaaattttccagtgtcggggcttcgtttttgcgagcggtgagccaaaaacaaatctttattatgacagcactgactgtgagcaggtgaatcagattttatgatcgtcagatactggattgccggtaaatcgcataggaaattccggcagtaattgcctcacagatccagaatgcatgccacacaccggacggaccaatcagacggctcagaagaaatgccagtggcagaatcaggatcgcatagcggcagagggagatcatcagcgacggtatgccttttccaagaccttcgagtgctccactggaagtgatggatacggaagatacgataaatccgagactgatgattcgaagtgctgtacttccggctgtgatcgtctgtgggttggtagtaaagagtccgagcaaagtgcccggaataaacatgcagagcagggtgcctgtaagcatgattccggcagaaagatataacgtataggaatacagtttgtgtacgcgcttttgttcgccggcaccgtaattgtatccaatcagcggacgcattccctggataatcccgtttgccggaagatacaggaaggtttggagcttgtaatagacaccaaggatcatcacatacatctgtccgtaaactgcgaggatcgcgttcagggaagaaatcagcagggaagacagtgccatatttaaggttgccggaattcccacagcatagatcttttttaacagtatgagatcaaatttcagagatttcagagaaatccttaccggcagcggacggatccatgcgaaaaacagatacgccgccagcgtaagcagctgtccaagcccggtcgcccatgcggcaccccggattcccatccggggaaccggtccgagtccgaaaatcatgatcggatccagaataatgttcagaatacatccactcatcatacagaacattgtggtcttcatccgtccgacggactggaaaatcttttcataagcaactcccagagatataataacagaaaaaccaaacgtgatccgggagtaggtgattcccatggagagaatttcctgttctttcgtgaacatggaaagaaacgccggcatgatggtaatcgttccaatggttaaaattacaccgtgaagaaacgaacaggcaatgccaagcgtggcgctggtatccgcttcttcctgtttctgtgcgcccagaaaataggcaatcgtcgcgttgatgccgatgccgaaaccgacacctacggcagtgatcagattctgaaccgggaagaccagagagagcgcagtcatcgcattttcattgatctttgccacaaaataactgtcgataatgttgtacagcgaattgaccatcattgacaataccattggaagtgccatggataaaagcaatggcaggataggtttctctttcatgtaagtttgttccataaaatatcctccttgaaaatatcgataccggatggtaccttttacctctgaaatcatgaaaataaaaaagccacataaccgcatctgtaggaacagaagggttatgtggcgaaaaatagatatatcctttcagaaaggatacatccagaaaaatccacacaggttttggatgtcatgtaagacagtcgtattctattggaaaacgaagggtttgtcaatagagtttaaaaaatttataaaatctttcagaaaaaggtaggcagatgaagagaaaacagatatagttattatttatcaaagaaagaaaaaatcagagaagttaaaggagaagcgatggaacatttggcgtggtatgaactgttactgctgttttttgccgcatcttttcttggatgggtgctggagactgcagcggcagatatcaaacagaaaaaatttgtaaatcgtggtctggtgaccggtccgttctgcgtgatgtatggtatcacgacggtacttttaacggtagggctgggagaattgcgtggtatctggttgtttttattttctgcaatttatgcgacggtggtggaatggatcgggggtcacctgatcgaacggttatttcatcagcgatggtgggattattccgggaaaaaagggaacttggacggttatatctgcctgggtgcttctgtgttctggggtgttctgggatttgtgatggtgacctggggaaataatctgctgttccggttgatggcgttgctgccgttgctgctggtaaaaattttacttctggtactggctggcctcctggtggtagacattctggcttcctatattctgcttcgtggttacggaaacaacatccgccagtgggaggaggcagataaccggatccgcaaagtcacgttacgattgcaaaactggatcggaacggtcattgcacgacgaatccgaaaggcatacccgaaagcagcggagacaaaaatcgaagagaaagaggcagcgaaagtgccctccacggtatttgccgccggatgcagtttttataaaattgttcttttatttttctgcggagcctttctgggtgatctgacagaaaccgttttctgcaggatcactgccggtgtctggatgagtcgcagcagtgtagtctggggaccgttcagtatcgtgtggggactggcaatcgcgctggtcactgccctgctatacaaatacaaagaccgttccgattccttccttttcggtatgggaacctttctcggtggagcttatgagtatctgtgcagcgtttttacggaattggtattcggtaaagtattctgggattacagtgagatcccgttcaacctgggcggcaggatcaatctgttatactgctttttctggggcatcgctgcggtggtctggttcaaactcctgtatccgcgtttgtccgactggatcgaaaagattccgatgaaaccgggaaaaatcatcacctgggcactgatcctcttcatgtgctgcaacatcgtgatgtcctgcatggcactgatccggtacgacgcaaggggaaaaggcgtgtctgcagaaaatacactggaagaatggctcgacgaacactacgacgatgcccggatgcagcggatctatccgaatgcgatcaccgcatcatgagcagtgaacggaaaaaataaagaccaaaaaactctgtctccagtggcatcaaccacagccgaaaaaccggggcgggagcgcgggatcagaaaggggaacactttgtgggcgtttagggcaagctttgagatccggcgcttacctacggaacctgccactggcagcttcctccggatgcaatgcaacgtaggctttcgcgagggtcagccgaccctcgtgaatatagccgaagttagcgactagctcaaagttgtcctgcccacgttccccgtctgatcccgcactcccgccccggtttttcggcgtccgcgtagccaataaaaataagaaacctcaagaattttcccccttcaacgcctgcgtaattcccttcaccgaagaagcatactccatcggagccatccccgtagccttcttaaactgcttcgaaaaataaggcagcgaactataagacaaaaaccctgcaatctccgtcagatttttccgtccgtcccggatcatatcctttgctcgctgaatcttcagtccgttaaaatattccatcggaccacatcccttctccttctgaaatagtttctgaatcgaagaacggctcagcgaaaaatgctcacacagctgatccagcgaaagctgttcgcagatatgaaactccataaactctgtgatttcctgtaagcgcttctcccgtgttcccgaaagttccaccggactcacgaacgtccccgtgatccgccggcgcggaaaaacatcagtctttgcatcattttgaagtactgtgacaagaaaaagctccagatacagcagaatcatctgctgggaaccaatcggtgcatccgcccgaagcttgacctgttctacggaaggaatattcatcggtgtggataatactttccgggcagtgtcgagaatgtgggaaaccaacgtccgttcctccatatttaatgtcatcttttttccacggaattcacccattgccggagaatgactgacaaaagagacagcaacaagatttggtgaagaatttccgactgagcggatcgcatgaaactcatttggttcatggaaaataatatctccggcgtgaagtgtaaactgatgttctccgccctgaacgatcacactgcctttatcaacatacataaattcccagaaatcatgggattccccacggaatacaaaatcccgcatatattcaaaataatgaatcgtgatgatcgaatcaatcacaatctcgcgtttcagctttgtttcaatataagtcataagtgaacacatccctccgaatacccctattttaccagagaatagggtaatccacaacaaaaggatcggcctgatttcgtgcaaaataagcgctttatcatggtaaaatgctaaaaagcatacgcaatcagacaataagagtacacaataagacaactcaaaaacgaaaaaactggttataatgaataaaacaaaaacaactgtctgagggacaaggacgaacagttgacaaaggaaaaaaataaagaggcaaacacctatgatgataattgaaagaggaaatacgaaagtctgtttctgtcaggagactctggcggtgacggtagtaaaggatcagacccgctgggaatgggcggatggctttcagccgaaactgatctgtaaagaaggaagcttttcttttctggatgcagtaaccatcacccatgaaacctatactatgggtgtcggcatcggaatccgaagctgttttgagggatttgaaaaagacggcgtgacttatccgtatgcttttgagacactgatctggatggaagataccacagaacaggtatatttcgaatgggttccgttaaaagaagaagggcttcaggttgaaaaagtactctggccgggtcagatggcttttgaagaaaagaaagacagctggtatacgctgctgacacatcagcagggtattctgattccgaatgactgggagataccgttgtctgcgattccgtttgcaggattctttgaaacagcaggcggatatatgccatggttcggtcaggtaaaagacagacaggggtatatcgcaatctgcaccacaccgtggaatgcaggatactatgccgagcatccggcaggcggtccatacactcacgtcggagtatactttgaaccgagtctcggaaagatggattatcgcagagtgatgcgatatactttcctggatgactgtgattacaatgatctgtgtaaagaatatcggtcttatgtaaacgaacagggaagattaagaacgctggaagaaaaagcggcaagaaatccttccgtcaacgatctgatcggatgtgctttcgttcacaagggaatcaaaacccaggtgcaacacaactccgatttctttgatccggagaatccggaaaagaacaatcatctgacaacttttgcacaacgtacaaaagaaatcagagaacttcatgagcagggagtggaaaagctgtatcttcatctggatggctgggcacagccgggatatgacaaccagcatcctgattatctgccggcgtgtaaagaggccggtggctgggaagatatgaaagaactggcagataccatgcacgaatgtggttatatgtttggtatccatgatcagtacagagatttttataaagctgctccaagttttgatgaaaattatgcctgcagattaccggatggaagtattccggagcaccagagatgggcgggaggtccacagtcatatctgtgtgcaacacaggcaccgtattatgtgaagcgcaattttaccgagatcaaaaaacacggaattcggctggatggtgcttatctggatgtattcacctgtaacgaaggagatgaatgtgacaatccggaacatcgcatgacacgtagagaatgttatgaattcagaggaagatgctttgagtatctgctctcccagggtatcctgccaagttcggaagaagtaagcgactgggcagtcccgagtctagttttctgtcattacgcaccgtatgattttatgatgaaaaaaccgggaacaccgaaagaaggcgttccggtaccgttatacaatctggtatatcatgactgtgtgatccagccatggatgatggataaagtaagcgacgaggaagattacatgctgtacgccctgttaaacggcggtgcaccgtatctgatccgtgatgcggcttatccgaatatcgacggagcatttgacgataacgtagcactgagtcgaaaagaagaaatcgaacgcagcaaggcagtggcagaattacataaacaggtggcaaaatgcgagatgctgcatcatgagatggtagatggagattatatggtacaggagacaacgttctccgacggaaccggtgtacgggtggatttcagaaaacaaacgtaccagattttccataaataaaacgattcaatacgaaaagacaacgagagggagccaaagcgggcatatgtacaggaagactgtgcatacccgcttttcccgtatcaggctgagaagattatggcattttcaaaaaaagatgttataatgatacagaataaatagttaaaacaaatacgtatgtaagtgggtaacccttttggctagtacaacgtaagaacggaacagttactcattttcataatagagtaacccgacaatgaatattccaacaaagggaaaaggagagaaaagtcatgaaaaatatgaaaaaaattgcagcactgggtatgtctgctgtcatggtagcaggtatgatggccggatgcggaagcagcagtgattcttccagcagcgacagcaagggaagttccaaatccggtgacaaagtagaactgacactgggtatctgggatgaaaatcagagagatgccatgcagaaaatgatcgatgcatatgaagcagaaaatgataacgtatccatcagcatccagctgacaccatacaaaggtggagaatactggacaaaactggaagcatctgcaggcggcggaacagctcctgacgtattctggctgaacgttctgcatctggattcttacgtggaaggtggtatcctggatgacatgaccgatgcaatcgcttcttctgacatcaaagataacttctcggatactctggtaaacaactatgttcgtgacggtaaaaactatgcagtaccgaaagacttcgataccaacgctctgtggtacaacaaagacctgttcgaccaggccggtgtggaatatcctaccgatgatatgagctatgaagatctggtagctcttgcaacagaactgaaagacaaactgccggaaggtgtatatccgttcgcctgcccggttgacttccagacatggtattatcagactgtatacgcaaatggcggctggatcctgaacgatgatgctaccgaaacaggatacggtgatgcaaaaacacaggaaggtatccagtgctggatcgatatgatcgatgccggtctgtcaccaagtgcttctactctgtctgagacaggctccgatgccatgttcgaaggcgagcagatcgctatgacactggctggttcttacatggttccggaatacgcttccaacgataccatcaaagacaaaatcgactgtgtagaagttcctaccttcaatggtgtagaagacaactgtatcaacggtctgggattcgcagtatatgaaggatccaaacagaaagaagaagctgagaaatttgcaatctggatgggaagctctgaagctcagaagatccagggcgaaactggtgttgtaatctcagcaagaagtgatgcacagcagtatttcgcaaaagcaaatgaacagtacaacctggcagcttataccaatcactctgatgaagcttacccactgccggtatgcagcaaagcagcagaactgtatgatatggaatctacctggttaacaaaagcttatacgggcgaaatgtcactggcagatgcctgctccggcctgaaagaagaagcagacgctctgttagcaaagtaataaagtaggtgaaagaatggctgacgtgaaagcaaaagtaaagacgccgaagaaaaaagcgtcgaaaagagagaaaaaagactggattgccgcatatatcctgattgcacccgttaccctgggtctgctggtgttttatatctggccgtttatccagaatgtctggttcagttttaatgatgtaaacaaatttaatatgtctacttttgtaggtcttgcaaactacaaagaaatgatcggtgacaaagaagtatggagaaccttcggcaataccctgaaatacgttatcgtaaccgtaccggtagggctggcgttatccactttccttgcggctttactgaatgcaaagatcaaaggaaaatccatttaccgtaccctgtatttccttccttcggttaccatgtctgcagctgtggccatggtctggaaatggatctacaatgaacagatgggtatcctgaacagcgctatcaaagccatgggaggaaccggtcataactggctgactgattccaagacagcattgtttatgattatgatcgtaggtctctggatgacggttggttataacatgattatcttactggcaggtatgcagggaatcaacagtgtgtattacgaagcagccgctatcgacggtgcaagcgaaattactcagtttttcaaaatcacggtaccgatgctgacaccgacagtcttcttcgttatgattacatccatcatcagtggtttccaggtttttgatactgtttacatgatgatcggcaaagcaagtccggcattcgaggcaacacagaccgttgtggcactgttttaccggacagcgttcgactatggttataaaggatatgcagcagctatttctattctgatcttcgcagcgatcatgatcgtgaccgtgatccagatgatcggacagaagaaatgggtgaactacgactaaggaggagtgagaacatgaaaggtaaatttaagctaaatcacctgatcgtccatctgatcctcctggtcggagtgatcgtggttgtatttccatttgcatggatgatcctgacatcatttaaaacatccggtgaggcgatgaagattccgccgacaattttcccggaaaaattcgttacaacggcatatcataccattgtaacttctgcaattccgtttgcaactgtttatatgaatacgatcattaccaccgtggttaccacactggtacagatcgtgttctgttccatggcaggttatgcgttcggacgtatcgagttcccgttcaagaatgcaatcttcattctggtgttatctgtactgatggtacctggacagatcttccttctgccgcagtatcagatcgttcagaaactgggactgctggatacgatcccggcactgtttctgccaaacctgttcagcgcgttcggtactttcctactgagacagttcttcatgtctctgccgaaagaactcgaagaagcagccattgtggacggatgcggacgtttccgtatcttcgcacagatcatgctgccgctgatcaaaccgggtatcgtggcaatgtccatctttaccatcaagtttgcatggaatgactttatgtggcctctgatcgtcaacacttctatgaataagatgacactgggacctgcactgtctaccttacagggacagtacaccacagagtatccgatgcagatggccggtgcggttctcgccgtactgccgctggtagttatgttcttcatcttccagaaacagttcatcgaaggtgttgcacagtccggtatcaaaggctgatgttcaacctattgacaatgtaggaaaacgcatgctactataatccacagaattgtggagtttcaaataagacaaaaagatttcgggactttcagttcccggaatcttttttcgctttatagaaaagtatgaaaaacagggagagaaaaacaatggaaatgaccatacaggaagtaaaacagctggacaaagacagttaccagatcatcgatatccgtgatgaaaatgagatcgctcacggagccattccgggagccgttgcgatgaaggcagaagagattgcggagagtccgttgctcgataagaacaagaaactggtgatctgctgcagcagaggaaaatacagccaggaagtggtaccgggactgatcgaaaaaggatttgacgcagtcagcttaaagggcggttatatcgcatggctgatggatctgatgcgggaagaccaggagaaagatatcagtgccgatgtggaaaaaagtatccgtaaaaagttcagaaaatcgatctggtgtaaattcacaaaagctattaatcagtacgaactggtcaaagagggagactgtatcgctgtctgtatctccggtggaaaagattccatgctgatggcaaagctgttccaggaattaaagctgcataataaattttcttttgatgtgaaattcctggtgatggatccgggatacagcccggaaaaccgcaaagtcattgaggaaaatgcaagaaaactgaatgtgccgatcacgatttacgaatccgatattttcgaggcagtcttccatgtggatcagtctccgtgttatctgtgtgcgagaatgagaagaggtcatctctatcactatgcacaggaacttggctgtaacaagattgctctcggtcatcattatgacgatgtcatcgagacgatcctgatgggtatgctgtacggggcacaggtacagacaatgatgccgaagctgcacagcaccaatttcggcgggatggaactgatccgtccgatgtatctgatccgcgaggacagcattaaggcttggagagattataacgacctgcattttatccagtgtgcatgtaaatttaccgatacctgtaccacctgtaataatgaagagacaaaatccaaacgtatggagatcaaacagctgatccagacgctgaaaaagacgaatccatttatcgagagtaatattttcaagagcgtggagaatgtcaatctggatacggtcgttggctataaacagtatggagaacgtcattatttcctggaaaattatgacaagatgggcgagttgaagaaagaggaactggcgaagaaagaggcagcgcagaaagaagcggaagctgcggaggcagaaaagaacggagagaacgtgacagaacagaaagccgtagaagaataatcaaaattgctccactggaccaattgttgaaagataaaaagaaagatacaaaaaaattcttaaaaaagagattttctgtatctttctttttaagttacgcgagcaacgagtcaaaatccgtgctggcatagatgttgtattactgtgtcacataagttttcagcagctcaaacgtattccgcaccccatccatatgagagcgttcataattatgagacgcatagacacccggaccgatcaggccgtgacggatgtcgtagccggcgcgaagggttgcttccacatcggatccgtaatgcggatagacgtcgatggcataatcaagtccctgttcttttgcaatcgtggaaagagccgttaccaggtcataattgtaaggtccgccggaatctttggcgcagatggataccatccgctcggtacagccaaggtcggcaccgacacagcccatatcgacggaaatcatttcttcggtgtcttctgctacgaaacttccaccgtgtccgacttcttcgtagacggtaaataataaagagactttccggttcagtttcagtccgtcttctttgacagcatgtgccagtccgagcaggatcgctgcggagagtttgtcatccaggaaacggctcttgatgtagccgctttcggtgactaccgtgcgcggatccatggcgatgatatcaccggtctggatgccgagcgcgagcgtgccttctctggaatccacattctcatccagcagaatctccatatgcttctcgatctgctccactttctgatctgcaacatgggcggatggttctgtgttcaggacaacgccggtatacactttgccgtcgcgggtgtggatcgtacagttttccccgtctgcggtggaccactgatgtccgccaagggttgtcgggcgaagacgtccgttctctttgatggagcgcaccatagcgcccagcgtatctacatgggcagccagcacgagcggagatccggatcctcccagtgtgacaaaaacatttccctttctggaacgctccggagtaaagccaagagcggtcagttcggataacagataatctgtcgctttctttgtaaagccggaagggcttggaatcgcagtcagtgcatacagctgttctttgataaaatccatatgagaactcatgtgatgttcctcctgattaaaaaaatatgaaatacgtttttcattgtaaacaccggaagaaaaaaggtcaaccagaaaaaataaagatagaaagaagaaacggtaacataaagagaaacaaaccggcataaaatagcagttatagaattgaaacgattcaaaaaacggataaaaaagggattccctctaatggggacatttatcaataagtgtccgctgtacacatacatgtgtgcgaaaaataaaaacaaattgcgggatttttcttgacattaccacgttaaagtgagtataatatcacatattgtcgacaatttacaatcgacaggagagatgaaaaagagaggaaaggtgtagaaaatgacaaaatacacagttcgaagagtctgtatggcatttgttacgctgttgcttgttgcctgtattacgttctttctgatgaatgcgattccgggtaatccgtggttatcagaaaaaacgccatctgaggcaaccatccaggcactgaatgcaaaatacggactggatcagccaaagtatattcagcttggcaaatacctgaaaaaccttgcacagggagatttcggtacttctattaagatgcagaagaaccgtccggtcatcgagattatcaaagagatgttcccggtttccgcaaaagtcggaagtcttgctctgttatgggcagtaatcgtgggcgttccgctgggatgtcttgcagcgttcaagagaggaacctgggtggacagcttcctgcgtgtgctgtgcaccatcggtatctccatgccgggattcgtagtggcaaccctgctgttacataccctctgtggcggtatcgaaggagtgaaagtatttccggcactttttgacggaacaccggcaagttatatactgccctgtgcagcgttaggcttctatccgatgtgttatctgtccagacagacaagaactgccatgttggattctattaatcaggaatacatcaagacagccagagcaaagggactgaaaaacagcaagatcattttcaaacatgcacttcgtaatgcgttgattccggttattacttacctgggaccgcagatcgcatttaccctgtgtggtggtcttgtcgtagagactgtattttctattccgggactgggacgttattttgtacaggcgatccagaaccgagattatccgctgatcatgggaactaccattttcctggcagcatttatcatcgtcatgaacctggtggtagacctgtgttacaaactggtagatccgcgaattaatctggtgaagggaggaaattaaggttatgtccgataagaaaagatttaacaaaccgggctcacttcagccaaatatcgaggatattctgcagtggaacgatctgccggcagatgcatttgatccggcaacatcagaggaaaaagaaaactttattcaggaccgcagaagcgtatcttactggaaggatgcatggagacgtcttcgtaaaaacacggttgcgatggtggcactggtgatcatcatcctgctttctgtttttgctttcgtgggaccgtctgtcgttccttatacttacaaacagcagatccgtggttccgaatctttacatccatggcactacagcctggaggatcaggataagatcaatgcatacatggaagaacataacggtgcaggaaacctgacaccggacgaagcggtagaacaggcacggcaggaagcagaagccaaaggtgagaccttaagccgtgtagatgaagcaaagatccgtgcgaaagcaaccgtatctcagcagtctgctgacgaagaggcagtgacagaagaagaagctgccaaagtactgggtatcaaacacagcatattcggatactccaacaaagaactggagcgcaaggcagcaggagaaaaggtattcccgcatgtgttcggtacggatgatcagggtcgtgatatcatggtccgcgttatggttggttcccgtgtatccatcatcgtaggtatctgtgcggcgattctggtactgatcatcggtgcactgtacggttccatatccggttactgtggcggcatggtggacaacgtgatgcagcgaatcgtagagattatctactccatcccggagatgctgatcatcctgctgttatccgcaaccttaaaaccggcactggaacagttccagaactccggagacggcgtgttccagaaactggtaacactccttggaccgaacctgatctccatgtttatcgcttttggtcttctgtactgggtaaccatgagccgtatcatccgtggacagatcctgcagttaaaacagcaggaatatgtaacagcagcgagagcactgggtgcaaagggcggacgtatcatcagtaagcatctgcttccgaactgtatcggacagattgttactacaacattcctgcagattccgtcagcaatcttcctggaatctttcttatcttttctgggtgtgggtgtatctgcaccgctgaccagtctgggatccatgtgttccgaagcactgagcggactgaaaacctatccgtaccgactgttcatcccggcagtgatcctgagtgttatgatcctgtccctgaatctgtttggtgacggtcttcgtgatgcattagatccgaagctgaaaaaataagaaagggagagacacaatggaacagaataaaaaagctgacaagctgttggaagtcagagatctccaggtctctttcttcactccggcaggagaagtaaaagcagtaaacggcatcagttacgatgtgaattataatgaagttatgggtgttgtaggagagtccggatccggaaagagtgtggaagcatattcgatcatcggcctgttacagaatccaggaaaagtaatcggtggttctatcaccttcgagggccaggatgtcttggcgaagacaccggcggagatggtaaacttccgtggaaatgaagtagccatgatcttccagaacccgatgacctgtctgaatccggtatacaccatcggtaatcagctggtggaggcactgaaagcccatgataaaaatatcagtaaagaagaagcacagaaacgtgcgatggagatgcttgaggaagtaggaatcaataacgtggaaaaacgtatgaaacagtatcctcacgaactttccggtggtatgcgtcagcgtgtcatgatcgctatgggtctgatctgtcatccgaaacttctgatcgcagatgaaccgacaactgcccttgacgtgaccattcaggcacagattctggaactgatgaagaaacttcagaagaccaatcagatgggtattattttcatcacacataacctgggtgttgtggctgaaatctgtgacaaggtatcggttatgtatgcaggtaagatggtggagcagggaccggtagatgatatcttctatgcaccgggtcacccctataccagaggacttcttcgctccatgccccgtgtggatgcggaaagttacgaacgtctgatcccaatcgaaggaacaccggttgatatgctgaatccgccggagggatgtccgtttgcaccgcgttgtgaaagtgccatgaagatctgtctgcagaagatgccgccgtatgtggaacttggggataatcaccgtgccgcatgctggctgtgtgtacaggaacagatgaaagcacagaaagcagcagagaaaaataatgaaaaaacggaggcaggcagccatgagtgagaaaaatgataccctcgttcaggttgaacacctgaaaaaatatttcccaatcaaaggtgtgaaagggccgggtgtacaggctgtggaggatatctccattgagattaaaagaggagaaacccttggtctggtaggagagtccggttgtggtaagacgaccttcggacgcacggtattacagctgtacaatccgacttccggaaagatcatctatgacggcaaaactatttttgaaggaaaagacccgtggcagaaagatgaaaatggtattctgcgccaggtgaaagttccgaaagcaaaacaggtgaatatgcttccttaccgccggaagatgcagatcatcttccaggatccgtcagccagcctggatccacgtatgacagttggtgagatcatcggtgaagcattggatattcacaaattatataagagtaaacaggacagaacagaccgaatcaaggaactgcttggtcatgtgggactgaacacagagcatgcaaaccggtatccgcacgagttctccggtggacagcagcagcgtgtcggtattgcccgtgcgctggcagtcaatccggaattcatcgtctgtgacgaaccgatctccgcactggatgtttctatccagtcacaggtagtcaacatgctcgaagacatgcagcatgagatgggactgacctatctgttcatcgcacatgatctgtccgttgtaagacatatttcccaccgtatcggtgtgatgtatctgggaactatggtggaacttgcggaaagttatgaactgaaccgtcatccactgcatccatataccaagacgctgctctccgcagttccggttccggacccgcaggtaagcagaagcagacagcgaatcgtgctcgaaggagacattccgtctccgatgaatccgccaagcggatgccggttccatacccgttgcccgtatgcgaccgaaaaatgtaaacaggttgtaccgacctttaaggagtacgaaaaaggtcactgggtagcatgccatctgctggaagagtagatgaaaaataaccggataatgcaggaaatctgatagtggatgctcctgtttatcaataaaaggaaaaggagagaggataatatgaagaaaaaagttttatccatcctgttagctgcaacatttaccgtatctatgtttgcaggttgcggaaacagcaacactacagcaaaagacgacaacgcagctaaaacagaagacactgctgatgacgcagcagaggaagaaaccaaagatgacgccgcaacagaggacacagcaagcgacggtgacttcaacattactgtaaacctggcttctgaacctatgactatggacccggcgctgaacagttctgtagacggtggtatcatggccctgcatctgtttgaaggtctgatgaaatgggaagacagcggagaagctgccaatggttctgatggaacagctgacagcggaaaactggttcccggacaggctgaaagctatgaaaagacagagaacgaggacggaactgtaacttatactttcaaattgcgtgacggcatcaaatggtctgacggaaaagatgtaacagcaggtgattttgagtactcctggaaacgtctggtaaatccggaaacagcagcagactacaactacatgctggatggcgtggtaaatgccactgagatcattgcaggtgaaaaagatcctgatgaactggctgctaaagcattagacgacaaaacatttgaagtaactctggtaaacgacctgagctactttgaagaattgtgtgcattcccggctatgatgcctgtacgtgaagatatgatcgaaaaagcaggtgaccagtggacatttgacacatcaacttatatctccaatggtgcatacaaactgaaagagtggacacataactctcagattgtagtagagaaaaatgaaaactactatgatgtagaaaaccttggaccggaaaccatcaccttcaaactgatggatgaccagaacgctatgctgtccggcttcaactccggtgaacttgatttcatcgaagatgtaccgcaggcagagatcgctaacctgatcgcttccggagatatgaagatcgtagactatatcggaacttactatgtatgcttccagacacagaaagcacctttcgacgatccgagagttcgtaaagcattctctctggcaatcgaccgtacttacatcgtaaaccaggtaacacagtccggacaggtagaagccggcggatttgttccgtctggtgtatatgatgcagatggtgcagatggcgacgatttccgtacagtaggcggagattactataaaccgaccgatgcggattatgaagcaaactgtgacgaagcaagacagcttctggcagatgcaggatatccgaacggtgaaggattcccggttgtagaatacctgtacaacaccagtgatgctcacaaagctgtagcagaagctctgcagttcatgtgggaagaagaactgggcgtaaaagtaaccctgaataaccaggagtgggcagcattcctgcagacacgtaaagacggagactactccatcgcacgtaacggctggatcgcagactacaacgacccgatctccttcctggatatgtggatgacaggtggcggaaacaacgatgcacagtatgcaaacgatgattacgacgctctgatcaaacaggcaaagacaacaacagataacgcagaacgtatggatctgctgcaccaggcagaagacaaactgatcggtgaagacaacgtactggctccactgtacttctatacacagaaatatatgctggctgacggcattgaaggtatgtactactgcccactgggatatttcttcttcggatatacccatcaggcataaataaatgcaatgcaacgatacagcccggataagcagtccgggctgtatttttctaaaagtgaaagggaaaacgcagggagaaaaaagatgaaagcttatgaacgcttactgaaatatattacagtatggacgaccagcgacgaaaacagcacaacggttccaactacaaaaagacagctcgacctggggaatcttctggtagaagagatgaaagagatgaaactttcggatgtgtcgatggatgaatatggatatgtttacggatatcttccggccacggagggaatggaagatgtgacgccgcttggtctgatcgcgcatctggataccgcaccggactttaacgggcagaatgtgaaaccacagatcattcaggattataacggagaagatgtggtgctcggaacttccggcagagttctggcagtaaaagattttccgagactgaaagggtataagggaagaacgctgatcacaaccgacggaacttctcttctggggaccgatgacaaggccgggattgcagagatcctgacagcagcagaagacctgatgcgggaaaagacaccacacggaaaaatctgtatcgcatttaccccggacgaagaagtgggtggcggtgcacagtatctgaaaatcaaagaattcggcgcaacgtacggatatacgttagacggaagccatgaaggtgagatccagtttgaaaactttaacgcggcaggcgcggaggtcactgttcatggtgtcaatgtgcatccggggagtgcaaaagatatcatgaaaaatgcacagaccatcgcgatggaaatccacggacttcttccaaaagatgcgtgcccggagaagacggaagggtatgaaggattctatcacatgaccgaattcaacggcaatgtggaacaggcagtgatgcgttacatcatccgtgactttgatccggtcacatttgtggaaaaacaggagaaactccgtcaggcggtcgcacagatcaacgaaacctacggcgagggaaccgcggaagtaaagatcgaagaatcttaccgcaacatgcgtgagaagatcgagccgtgcatgcagctgatcgattacgcaaaagaggcgtgcaaagaagcaggcgtggaaccggatatcgccccgatccgcggaggcacagatggtgcacggttaagctttgtcggtctgccatgtcccaacctgggtaccggcggagacggcttccatggtccgtttgaacacattacggtggaaggcatggatctgtccgtggaaatcatcaaaaacattattaagaaaatgtgataccgaatggtttggcggattgcgggagtacgaagtacggagcaatctggtgttgtcaaatagaaaagaagtaactgttcagtagccactgtaccgcgaggtgttttggcatgaatatgccaaaatcccgaggcatacaagccaaaatgccatcaccgaaggtgattttaaatgcattttggctcgtaactgtgaaggtactgaacagttacgaaaagaaatactttacagtgcccggaaattcagataaaatatttcgtggtaagataataaagtaagacaggaagatacatgagcgaattattataccaaacattaagagaaagtgtagtgaatgcaatccggaccaagatcatgaatcatcagatacgccctggggagcggatcgtggaaatggaactggcacacgaattccagaccagccgggggccgatcagggaggcactgcgccagctggaaaatgaaggaatcgtagagtataccagaaatgtaggatgttccgtgcggacattttctttctgggattcctatgaagtatatctgcttcgtaccaactatgaggccgtcagcgtgcggtttctgaacgggaaaataccaggggaaacgatacagaaaatggaagagattctggagcgaatgagaaaaatttcaacagaagagttcgagagcgtttttgaatacgacaactgttttcatgagcagctggtgttgatgtccggacttccgagacttgccaaagcgtggaaagaactgtactatggaaatctgctggcagggtacgaactggtaaatgaaaaagaaaagattctggcacaccagtatgacaatcatattgcgattctgaaagcctgtaaggaaggcaacccggaaaaaatctgcgatgaagtgaaaaaacattactggaagacaattttctgtatgatgcaggaacaaaagattaaagatcctgatctggaacaggcatggatgatggcaatctagagcctttttcagacacgctctagcaaaagatggagaaaaagcatggaagaattatatcaggcaatcgaagaaaaaatcaaagcttccggatatccgagagaaatatccggggaacgggtctatgatgatatctgtgatcagatcgaaggaaaagaaaacggaacgtatctggtactttccaaatttgaggaagatgtggtatttgagtatcatatcactgtttctgatgacaactttaatctgggaattctgacgatgaagacaccggaaggagtttttgagacagattttgatcgctgagcgttgtgtcgtgaatggggaatactaaaaatcccctgaatccagagatgtgattcaggggattttttcatatggagagggaaagatgcaaaaatatatgcaaaaaaagagaatctttccggcatgtctgtttctgatgtttgttctgatgattctggtaattggaaaagaaacagacatgactggcagaggggaaactcagaaaatccggaatctgagcgagggatggtattatctgaaagacggggaaagaacagaagtgactcttccgacaacacttcaggaagatccgggaacagtactggaattatataacgatacagtgacggatgagaacagagatatggttcttcttacctggggagcaccatatcacctgcagatccagatggatggaaaaacaatttatcagtatcgggattacggatttaaaagaaacctgcagatggcaagaaaactggaatgccgcgtgacattgccggcgttacacaaaagcagtcagctgtgctttctgtatactgtgccggaaagtggagtgtgtaaactgacaccggtatatatggggagcagcgaagctattttcagatttcagatcatgaatgcggcgcctgtgtttgtgatcgttctgggtatgctggtactgggcattttcgcaatcggaatctatgcgtatcttcgcgcacggaaaatgacagaacgacggtttgccagtgtgggattgtttctgctcttatgtggcctctggtgcgtgacagactcttcgctgatgcagtatctgagtcattattcaccggcgatcaatgaaatatctttttatgcgtttatgcttatgagtgttccggttatccggtttgtgcgggagacagaaggaatgcagaagtataaaagcatatcggtgctgattgctctgttttatctgaatgtgattttgcaaagtatctgcacctactggttccatattcagcttatcaacatgctgatgattactcatctgcttcttgtgggtggatgtatccttctgagtgttcttttataccgggaatacgaggcagtgaaaaacaggcagatatattcgatcctcatggcattcggtgttctggcttttgtcggcgtgggaaccctggtgttatactggtttttcggaattaccggatacgatctgattttcgaagcgggaattgtcgtttttgtatctgttcttctgtggagccttggcaagactatggtggaaaatatgcgttttaggacggaagcagaggtatataaaaaactggcacaggaagatcagatgaccggtatgaaaaaccggtacgcctatgaaaaaattttagaggatcttgaagatggtatctgtaattggaaaaatgcagtgctgatatttatggatatgaatcatctgaaacagataaatgatatttatggacacggagccggagatgaacttctgattggagcagcacagagtatccagaaagcgtatggaagtctcggatattgttttcggataggaggagacgagttttgcgcgattcttccggaaataaaaatatccgaagaagaactttcccgcagactggatgcagcggtagaagaatataatcgttccaatgaccagaagctgtcagtagccaggggattcagctggttacaggacagtcgggggatgagaaagagtatcagtgactggaagttcgaggcggatcagaatatgtacagcaataagggctggtacaaaagagaagaagtacaagaggaaggtacccactatgagatataatatggattttttagtggcagcactgatctttctgattgtcttatggcatcattttatgaaacaacgacagtatgcaggtaacaagacagaaaaaacatttcagatttttatgatgcttggaatcggagatattctactggatatggtcagtacagttgttattgacaacagtcgtccggaattcgccagaatgctttatgtgattttattgctgttttatctgtgccagctgctgattccaccggttctttatctgtattcactggcactggcaggaggggcagtggaagaaaaattatcggggatacgttgtctgctgcttttgccaaccgtggtgcttacggtgctggtcatgggtaattttcaaacaggtcttttattttctgtcacagcgaacggagcatatatcagggggccgctgtatcttatgatgtatatgcaggctgtctggtatggtctggtgatcggtggggaaagcatccggaattatcagaaactgggaaaacgaaaatttggtataatctgggaaattctttttattatggtcagctgtgtgctgttgcagggattttatcaggaagttctgctgaccggatttgctatagcactttgtctgatggtcctgctgcttgcttttcagaacccgtatgtgtataccgataatctgacaggacttttggatatgcaatgttttcaggagtgggcagaagaacagtgcagacgcaaacgggatattcatgtggcagttgttgatctcaggcagctgaaacagctgaataccatttacggggttccatggacagatcgttttttgaaaaagatagcagggcagatacgggagtttacggaaagtccctatgtttacagaatcagtgggaaaaggatactgatcggaatgtactcttttgaagaatacgaagcagtattgcagaagctgctgcagtatttttctcatccgattgccatggaaggggaagaaattctgttttcagcagcaatctgcggaataccatacgggaatcagcttggcagtgaaaatctcctgaattatgtagaatatctgacggcactagttccgagaactcaggaaacattgctggtccggggggacgaatacgtgaagcacggatttctccggcaaaaaacaattgaagcatatctttacagagcgatagaagaagatttgtttgaagtatattatcagccggtttattcgatcagggaaaagagatttgttacggcagaagcactcagccggctgcatcaccctggtctcggaccgatatctccggaaatatttatacggattgctgagcagaatggacaaatcaatgagattggcctgcagcagttccgaaaagtgtgccggatggtccaaaaatgtccggaaatcatgcagcagctgaaaaatatcaagtacaatctttcaccggcccagcttctgaagaaaggatatgtcggacaattgctggaaattatccgggaacatggattggagccgtcgttttttcagtttgagatcacagagaccgttgcgacagaatacaaagaagaggtgtatgaggcggtggaagtctttgtaaaagatggtataggcctgtgcatggatgattttggttccggatatgccaatctgaatgcggtactgaaattgccgttccagtgtatcaagatggatcgctccatgttaaatggtatccgtcagcataaggtagcaggagagttttatcgtaacattgtaacgattctccggcaacagggatatgcgatcgtggcagaaggagtagaagagcaggaagaggtggaacttctggaagcgtggggcgtggatatgattcagggatattatttttccagaccactcccggtggaggaatttctgaaaaagatccgggaagccggataaataaaaaagaggaagctcatatcggagacttcctctttttttgcagagtttaataaatgttgcttatttcatgatcttacggaacaggtctttcagatcttccacactggcatcttttgggttacccggtgcgcaggcatctgcgtgggcagattctgcaaggaacggcagatcgtcttctttaactgcgtcgagaacagatgggattcccacatcagcggacagttttttgacagcatcgatagcggcttttctgtattcttcctgtgtcatatcatcgacatctttcacacccatagcacgtgcgatctcacgatacttctcgccggtgcattcctggttgtattccataacaatcggcagcatcatagcgcaggcaacaccatgtggggtatcataaacagcaccaagagtatgagccatggaatgagcgattcccagacctacgttggagaatcccatacctgcgatatactgaccaagagccattccttcacggccttctttggtgttttcaacagcaccgcggagagatcgggagatgatttcgatggctttcagatggaacatatcggtcatttcccatgcagcttttgtggtgtaaccttcgatggcatgggtcagagcatccataccggtggaagcggtcagtccttttggcatggaggacatcatttccgggtcaacaacagcgatgatcggcatgtcgtgtgggtcaacacatacaaatttacgttttctttccacatcagtaacaacatagttgatggttacttccgcagcagttccggctgtggtaggtacggcgatgatcggtacgcaaggttttttggtcggagccacaccttcgagacttctgacatcttcaaattccgggttcgcgatgataataccgatggctttggaagtatccatggaggaaccaccgccgatagcgatcagataatcagcaccggaatccttgaaggactgtacgccgtgctgtacattttcgatggttggattcggtttgatgtcgctgtaaagttcatagtccagaccgttttcttttaacaggtcggtaacttttgaagttacattgaattttaccagatccgggtcggagcatacgaacgcctttttaaatccatgtgcttttgcttcattaacgatttcctgaatagcacctgctccgtgataagaagtctgatttaacatgatacgatttgccataatacaaacactccttttcttctgggaatcaccgttttccggatgttccgttcttttgtgattatattaacaatgtttttgaaaaaaagaaagttacaggatttggcaaatgtaacattttgataagaaatttttgttctattccgtcagaatgccgaaagaggcaaaaaggtctgcaagtttcgcaggcatggcttccaccatcaggcgtgccaggtcttccggggaggttgccatgccggagagtacccattcgatagtcatggagattgatccgtggcagtacatctcaaggagaaatcggatatcatcggatgccggagcgccggtctttaactggatcagatcctgataaaagcggaagatcagctgaaaatcatgttcccgcagggagttctgccggtcataacggaaggcggcacggaaaaattctttttcttccccaatataggagaatttcaactgtaacccttcctgtaccgtttttccctgtcccatgtattcaaaggatttgatcagcaatttgtcaaagtaccagttgatcagatcaaatttgtccataaaatttcgataaaaggtctgtctggtcagaccgcagttttctgtgatctgacggacggtgatggcatctaccggggtgtgacacatacactccttcatggattctgccagtctgtattttgttttctcaccccgtgtgagggaagaagattcgtttggtaaggtcataaagaaatctcactttctgtttgttatgcattgcatgggaatgatgaacagtaaacatttataatcataagcatcatagcacacaaaggaagaatttgacagaaaaaagacagggatggtaaaaaatatattgtaggaagtagtcaggggatttataataagcacaggaaagaaaatgggggatgaaaaattgattgcattattgctgatgcagcagattgctgtattgtttttgattatgggacttggttttctgatcgttaaacttggaatcgtgaagacagaggacagccgggtactttccatggtgacgatttatctggttttgccctgcgtgacgatccatgcttttcagattgaatattccacaaaaataagaaatggctttctgcttgccgttgttgtggcgattctgattcatgtggtgctgtttatggtctgtggaattctgagaaagctgctgaaaatggatgaagtggagacggcgtctctgatttattccaatgcaggtaatctgatcctgccgctggtcacttccatcctgggggaggaatgggtaatctatgccagtggttttctgtgcgtacagacgatcattgtatggacccacggacagtctctgatgcagggacagcgccaggtgaactggaagaaaatcgtgcagaatatcaatctgatcgcgattctggcgggactggtatttttcctgtgcaatatccatctgccgaagattctcgattctatgacttcatcccttgcgggtatgatcggtccgatcagtatggtgatgataggtatgcttctggcgggagttgactggaagctggtctttggaaaacggagaatctatggtatcgtatttttgaaaatgatcgtagtgccgggaatcattaccctgtgtctgaaactgacggcaccgctgatcccgatggagaatgcaaaaacgatcctgctgatcagcctgctggcggtgattgcgccgacggcggtaacaatcacacagatggcacaactttacaaaagagatgctgcgtatgcaagctcgatcaatgtatttaccaccctggtgtgtatcgtaacaatgccactgatggtgatgctgtatatgatataatgagtgttagcgagcgggaacaaccgaagtttgttcatcgggagcggcgaatgtggatcatgatagctgcgaaagcagcgtcaagtaccgaaggtgcgaatcatgatataatgagcgcaagagagtcagagggagcttgctcactcttgacgaacggcgaaattatggagtgatgaaatcacgaaataagaagcagacggagagaaaattatgcggattaacagagaagatatgctggaactgacccggcggatgacagtaaaacgatcctcgatgacacggatcgcgggagcttacatggatcgggaagggtatgtggacggaacctttaatactaattttctgaaattgtctccggcagataaggagaaaaatctggcactggcaaaaacagttccgttttcggaaaccaatgtcaacctgaaacggtaccggtttccgaaagaacagatgacagccggaacgatgtggcagctgttaaacgggatcaggaacagcggactgaaaaatgatgcactgatggataccttttatgagattgcaggggaagagtatcgttcctgcggagattatgccgtgtatatgtcccatgaccgctacgatatcccggtgaaagcagcagatcatgagcgggtgggagagtcagaagaagtctacgaatatctgatctgcatcttcgccccggtcagcggcgactatgaaccgggacagccggagtgcgggtttatttacccggcgttttgtgacaggagcagcgactggaattatgtggatatttatcagaagaatccggaacggccgcacaatgagctgcggaagattctcggggtatagaataaaagaaaaataaagtgagttacaataaagataaggtgacaaccaagccggcatgacggatctgtgcgccggcttggtttgaaaggagaaaaaaatggcaattgtatttcacaaagagagcagatgttttcatctgtataacaacgaagtaagttatatcattcgtatcatggaaaatgagcagttagagcagttatattatggaaagagaattcatgaccgggaagattttacctaccttcatgaagagtgtatgcgttcccagatgtccatcaatgttccggaaccgggtatcctttccatgcagtatacaaaacaggaattcccgacttatggaaccggtgattacagaagcccggcactgacgatcgtacaggagaacggaagccggatcgtgaactttacctatgcatcccatgaaatttataacggaaagaaagacattcttccgctgccagctacttatgtggaaaatgaagatgaggcgcagaccctggaagtcactcttcacgatgcagtgatggatactgacctgatcctttcttatacaatctacgaagagtatccggtgctcacaagaaatgcaaagatctgccacaaaggaagtgagaagatcgttctggacaagatcatgagtgccagtgtggaattcaatgatatggattatgagatggtacagctttccggcggctgggcaagagagcgttatgtgaagaacagaaaactggaaatgggtatccagagcatccagagcttaaacggtacctgcagcggcgcggagcagaatccgttcctagcactgaaacgtccgcataccacggaaaatcagggcgaagtatacggcttcagcctggtatacagcggcaaccatctgggacaggtagaagtctccacttttgatatgacccgtgtgatgatgggaatcaatccggaagacttcagctgggaactggcacagggcgaatccttccagaccccggaagtagttatggtttacagcgatcagggtctgaataagatgagccagacatatcacagaatctaccggaaacgtctgatgcacggaacctggagagaccaggcacgcccgatcctgttaaacaactgggaagcaacttattttgattttgatgaagaaaaaattctgaatattgcgaaaaaagcgaaagaagcaggtgtggaactctttgttctggatgacggctggtttggtgcgagaaacgatgactaccgtggactgggtgactggtatgtcaatctggaaaaactgccatccggcatcagtggtctgtccagaaaagtagaagaactgggactgaaatttggtctgtgggtagaactggagatggtcaacaaagacagtgatctttaccgtgcacatccggactggatcatcagtgcaccggaacgttttgagtcgcatgcaagacatcagtttgttctggatttttcgaaaaaagaagtggttgactatatttatgagatggttgcaaaagtgattcgtgaatcctcgatttcctatattaaatgggatatgaatcgttatatgacggagccatacagtaaaggaaccgaaccgtcccagcagggtaaagtgatgcacaaatatattttaggtgtgtatgatctgtataccagactgaccacagaattcccggagatcctgtttgagtcttgtgcaagcggtggcgcaagatttgatcctgccatgctgtattttgcaccacagacatggaccagtgatgataccgatgccagtgagagaaccaagatccagtacggtacttcttatgtatatccgatcgtcagcatgggatctcatgtatctgcggtaccgaaccatcagttataccgtacgacaccgatcgagacaagagcgaatgtcgcttactttggaactttcggttatgaattggatctgaatctgctcagtgatgcggagatggcaagtgttaaaaaacaaattgcatttatgaaagaataccgggaactgatccaggtagacggcgatttctaccgtctgttgaatccgtttgaaggaaatgagacggcatggatggttgtttctcaggataagacacaggcagtggcggcactgtaccagagactgaacaaagtcaatgcatcctggctgcgcctgaaactggaaggtctggatccggatgcaaaatatcaggtaagctgtgatctgaccccgtcctcttctttcgacacagaactggcaaaacgctacggttacgatacagaagaaaatcaggtaaaaacatatgaagcatacggggatgaactgatgcgtgcaggtatcccggtcgacagacaggagctgaataaaaagggtggagattttgcttccttactgtatacaattaagaaagtggattgataaaaaattttttaaacagcacgttagtgtcagcctgaaaacttactgaaggaaaaaggagagacaggattatgcaaaaacaatacagattaggaattccttcgtttattactgtagagacagaagatggcagctggatcggggagaaggatgcacagaaaacagaaaaagacgatgttgttgtaacatatgaaaccacaccggaagcagaagaagtctggctgaccgcagatcagacaaaagtaaaaacgatcaaattccgctggaacaccccggtcaataagaaatcgcggatccttggcggttcctgggagagaacatacggggatgtggactggaaaggtgtcagcggcagccgttttatgccgtggtattttctggcagcggtcggagaaactgtgacaggatatggggtaaaggtaagaccttccgccatgtgtttctggcaggcagatacccgtggaattacactggtgatggatgtgcgctgtggcggtatcggtgtgcagctttccggtagaaaacttcgggctgctcagatcgtagcgatgcaaactgaaggaatggggactttcgagagtgccagagagttttgcaaagtcatgtgtaccgatccgatcttcccggactatccggtttatggaagtaataactggtattatgcttatggagacagttcagaagaagagatcctgcaggataccgactatatcgtggaactgaccaaaggcgtggacaatccgccgtacatggtgatcgatgactgctggcaggaacatcatcgcctggatgagtacaatggtggaccatggaaaaaaggaaacataaaattccctgatatgggtgcactggcaaaaaaactggaagaaaaaggcgtacgccctggcatctgggttcgattcttattgaatgaagaagagacgattcctcaggagtggagattatcccataacgattgtctggatccttcccatccgggagtcctttcctatattcaggaagatgtggaaaggatctgtaactggggttatacactgatcaagcatgattttaccacttttgatatcttcggaaggtggggcgtggagatgaacccgttcccgacagaggatggatggcaattttacgatacttcaaagaccagtgcggagattgtaaccggactgtaccaggcaatttatgaggctgcgaaaaagcaccatactctgatcatgggctgtaataccatcggccatctgggggcaggtctgatgcagctgcagcgaaccggagacgataccagcggtatcacctgggagagaacaaagaaaatgggagtcaacactctggcattctgtctgccacagcatggaacattttttgatgtggatgcggactgcgtaggtattacgggttccatcccgtggagcctgaaccgtcagtgggcggatgttgttgcagagtccggaacctctctgtttgtctcagcaaaaccaggggtgctgacagcagaagaaaacgaagaactgcaccagattatgttaaaagcatcccgacaggatcatcacaaaatcccgttagactgggaagaaaccgactgcccggaagtgtggggagacgaagaggaagaagtagaatacaactggtacgaagaagccggaccggtagcaaaaggaaatgaccaactgtatcatgcgtatattccgctgtcataaaataaatgagtgattgcaagaggcgaaaagtttttaaaaggcttttcgccttttgcctgatataaaacagattattttagtgaaagtaaaaaaataatcctgtataagatgaaatattagaatttgcaaagtgtacggagaataaacggaactgacaaaatagtatggtatatggaaataaacaggtgtataatgcagggcagagaccgtgagaaacacgggtgcaccgggaaaacttaaaagaaaaaccgggtgcaaaaagaaaggacgaatgaaaatggacatgacgagaatagaaaaagtaatcgaagacatgcgcaagatgaatctggaacagtttcttgtgacagatccgatggctgtgtattatctgaccggacagtattatgcatgtggagaacgtatgatggttctccgactggatgtggaaaaagagccggtactggtgatcggaaagctgtttccgcaggatgaagaaaaactgggaatcaaagtcgtatactttgatgataccgatgactgtgtggaagttctgacttcccatatgagaaaaggcggaaccatcggtatcgacaaaacctggccggcgcggttcctgcttcgcctgatggaacttcaggtgggagatgcgtatagtaatgcatccacgatcatagatcatatccgccagatcaaaacagaagaagagcagcaaaagatgcgtgtggcatcccgctgtaacgataccagtattgaagaactgatcccgcttgtaagcaaaggaatgacagaagcggagctgggagaagaactcctgaaaatctatctgaaaaacggtgctcagggacattccttcgagccgatcatcgcgtacggcgcccatgcagcagatccgcatcatgaaacagacgattccaaaggaagttatggcgatgcggtagtcctggatgtgggatgcctggtcaacggatactgtgctgatatgacaagaactgtatttatcggaaaagccagcgaagaggcaaagaaaatctatgcgatcgtcaaagaagccaaccgccgcggtatcgaagctgcaaaaccgggtgcaagattctgcgacgtagaccgtgcagccagagactacatcgaagaacagggctatggccaatacttcacccatcgtaccggacacaatatcggattggaagtccacgagtttggcgatgtctccttcaccaacgaagaagtcctgaaaccaggcatgtgcttctcagtagaaccgggcatctatgtcccgggtggcattggcgtaagaatcgaagacctggtcctgatcaccgaagacggttgcgaagtcctgaaccactttacgaaagatctgattgaggttgaagcatagcaagtaaaaaaatgtgctccctgaaagacaggtaatctgggaaatcatctacataggaagggaatctggtgaaaagccgacttgccctctgcgatattatattaaaaagaaatagcaatcacttggcatgggtgatgctatttctttttgttatatgcttatctatataagacagaaataagaaatccgcaaaaaacatgagtaagtagccaaaataccttttgcccccaatatcatggtaatttgaatttacaagatttcggtttctatagtttcagccaagaacagcatcaggcagggatttgctctgcaggcagcactttgtgggcgcttaggggaagctttgagatccgacgcttacgcaggctttcgcgagggtcagctgaccctcgtgaatcatagccggagttagcggctagctcaaagttcccctgcccacgctgccagcagagcaaatccctgcctgatgcgtccgccttgaaaaatccctccaacaattatttctttcaattccctgttgacatatcctgtataattgtatacaatcatacaaagatacagaaatacaggtatgcaatacaaaaataaagaacaaaagcacagaatcaatctggaggcaactatggaatatcaggaacaatccctggggggccagatcttcaaccggatccgggacgacatcttatccggaaactacactcccggtgaagaactgaaagaagcaaccctggggaaacaactgggagtcagccggacaccggtgcgggaagccctgcggcagctggatctggaaggtctggtggagatcgcaccaaaccgtggtgccaaagtaatcggcatctcccggaaagatgtggaagacatctatcatatgcgggcaagactggaaggtctggcggcgagaaaagcggcagaacaaatcaaagaagaagaactggcagaattggaagaggtaatccttttatctgaatttcatgtaaagaagccggagagcaagcagatggtccggctggatggaagatttcatgagatcatgtaccgggcatcgggaagccggatgctcgaacacgtgctgaccgattttcttcattatgtgaaaatggcgcgctcccattccgtaaaaacagaacaccgtgcgcaggaatccgtgaaagaacataaaaggatcctggaagcaatcagacaacgagatggagatctggcagagcagctggcaaacgaacatattcagcatgtaatcgaaaacctggatctgcactgaaagataccaataaaatctgtaaaagagaaaaaccagaaacctcaaacggttcgaaagacaaaaagcagaataaaataagagaataaacaggaggagataagaaatgagtaaaattcagatgacaacaccactggtagagatggatggagacgagatgacaagaattctgtggaagatgatcaaagatgatctgctgcttccttacatcgacctgaaaaccgaatactacgatctgggtctggaacacagaaacgaaaccgatgatcaggtaaccatcgatgcagccatggcaaccaagaaatacggtgttgcagtcaaatgtgcaaccattactccaaacgccgcacgtatgactgagtatgatctgaaagaaatgtggaaaagtccgaatggaaccatccgtgcgatccttgacggaaccgtcttccgtgctccgattgttgtgaaaggtatcgagccgtgcgtaaaaaactggaaaaaaccaatcaccatcgcaagacatgcatatggcgatgtgtataaaaacaccgagatgaaagttccggggcctggaaaagtagaactggtttacaccgcagaagacggaacccagacaaaagaactggtctttgatttcaaaggacctggcgtggcacagggcatgcacaacctggacaactccattgagagctttgcaagaagctgctttaactatgcactggatacgaaacaggatctgtggtttgcaaccaaagataccatttccaaaaaatacgaccacacattcaaagatattttccaggaaatctttgatgcggactacaaagaaaaattcgaggaagcaggcattacttatttctataccctgatcgatgatgccgtagcccgtgtgatgaaatcagaaggcggctacatctgggcatgtaaaaactatgacggcgatgtaatgagcgatatggtgtcctccgcgttcggttctctggcgatgatgacctctgtactggtatctccggacggctactacgaatacgaagctgcacacggaaccgtacagcgtcactactacaaacacctgaaaggggaagagacctccacaaactccgtggcaaccatctttgcatggagcggtgccctgagaaaacgtggagaactggatggcaacaaagaactgatggattttgcagatcgtctggaagaagcgaccattcgcaccatcgaagaaggaaagatgacaaaagacctggctctgatcacaaccatggaaaatccgaccgtattaaacagtgaaggatttatcaaagcaatcgctgagaatctgtaagagcaggaaaaatagagagaaacaaggaggaattcccatgggagcagaagaatttctgaacatagaagaagaacataaacgagagtttagcgaactgttacagtactgtctggcatccggccggatcgatcagaacctgtatcaggaatatgatgtaaaaagaggtttgcgtgactccagcggaaaaggtgtactgaccggtctgacagagatctcggacgttgtcggttatacgtatgaagacggaagaaagatcccagcagacggacagttatttttccagggatataacgtagcggatatggtggcgagcctggagaaaagaaaaaaaggcttcgaggaagtcatctatacactgctgttcggacgtatcccgaacgcaagacagtcagcgatgtttaatgatctgctgtcggatatgatgaatctgaacaaccgttttatccgtgatgttgtcatgaaagcatccaacgaaaatatcatgaatgccatgcagcgatgtgtgctgactctgtacacctacgatgataatccggataacaccagcgtggaaaatgccctgcgccagtccatgcagctgattgcaaaaatgccgctgatcgctgtatattcttatcattcctaccggcatttccgtcaggatgaaaacctgttgatcaaaaacccgaagaaagagtacagcttttccgagaatatcctgtatatgcttcgtgaagacggtcagtttaccgaactggaagcaaaagttctggacattgcactggttcttcacgcagagcatggtggtggtaacaactccacatttaccaatcatgtggtaacatcttccggaacggatacctattctgctgtagcggcatctatcggttccctgaaaggaccgaaacacggtggtgctaatctgaaagttcaggacatgtttgaaaatatcatggaaaactgcccggactgggaaaatgaagaatctctgagagattatctgaatgatattctggataagaaggtctttgaccatgcaggcctgatctatggtatgggacatgcggtatatacactgagcgacccgcgtgaagtgatcctgaaacgttatgcaaaattcctggcagaagaaaaaggaaagaccagagaatttgccctgtatgagaaagtggaagagattgcaggtgaactgatcatgcacaagagaaaactattcaaaccggtatgtgcaaatgtcgatttttacagtggattcgtttacacgatgcttggcatcccgagagagctgttcaccccgatctttgcgatctcccgtatggcaggatggtccgcacaccgtctggaggaactggtcaacgccggtaagatcatccgtccggcataccgttatgtgggacaccacagaccgtatctggaagtggaagaccgcgaggaacagaacccgttcaccgaggaataccagagaaaatataagattaagagcattaaaaatgcataaataaaagcaaaaatccgtctgacagagaaaatctgtcgggcggattttggtatatacgcgggtaatgaggcaaagtccgggcttgcacaagaccttgacgactgccgcaatagtgaacggggagggcaacgagccagaaggggggtgaatcaaatcagtccgtaatgagccattgatttcatcagtccgtcattttccacagtatctgtgacatactccgtatacggatcgagcacagggtcgtgatgccccagagccacggtgtgtttaccataagtaaacatggcaaggtcattactgctgtcaccgaagacataagcatcatccagtcccagtccgaagtgtttcaggataaaatcaatggcagttcctttggaatatcctttcggcacaacttcatagataccgcccagccggtcgatcagatccatatcttttgccagtgcagggaacagggtgtcggtatcggtctgctcatcggtgtagatgacgaatttgtcaaagtcgcaaagtccgctctcgatatagtgttctttggtcagtcccagtgtggcgagataacggcaggttccctccagctttgcaaaccgggtaatatgggaagaacggtagcagtcctcttttccctcgagaagcagtcctgcatttgccgcttttacctgccggatgatctctgcctgacgctccttcgggatctgcgtggaggtgagaacctcatcgttgtatacaatatagcttccgcagccacacagataaccgctgaacggcagccggcagatcatcggcggcagacagcagatggtccgtccggtgttgataaataaaagatgtccgagatcatgggctttttgcagggcagcagaggcagattcggggatcttaccggtgacttcacttaagatggttccgtcgatatcaaaaaataatgctttcttatttgtactcatgttgattctccgtataaatgttttctgtaactgtttggtaatccgatttttattacaagtgcagtttattatactgcctgagaatccaaaatgtaaagagataagatgaacaaaagcaatgagaagaatggtagaggaaaacgcattttgacagttaaaaagaaagttgatgagaaaaaatagaatctggggatttcagagggggcaaagtatgttaaaatagaactattcagcgggaaaataggaaggaatccgcagaaaaatgattaaaacaggtgtaactgtatggtgagtggaaaagagtgaagctatgaagcagttacaaaaagataaattttcaggagggagaaaatgacaaaaaaacagagaaccctggagattatagagcggttgaagaaagaatatcccgatgcggcgtgcaccctggattatgaccaggcgtggaaactgctggtaagcgtgcggctggcagcgcagtgtaccgatgccagggtgaatgtggtcgtggagggactgtttgaaaaatatcccagtgtggaagctctggcggcagcagatgtggaagatatcgaggcgattgtccgtccctgcggacttggaaaaagcaaggcgcgggacatcagtgcctgtatgaagatgctgcgggatgaatatgacgggaaagtaccggatgatttcaatgcgctgttaaaacttccgggtgtgggaagaaagagtgcgaacctcattatgggggatgtctttggaaaaccggcgatcgtgaccgacacccactgcattcgcctgaccaacaggatgggtctggtggacggaatcaaggaaccgaagaaagtagagatggaactgtggaagctggttccaccggaagagggaagcgatttctgtcatcggctggtgatgcatggaagagagatctgcacggcaagaaccaaaccgtattgtgatcgctgttgcctgaacgatatctgcaaaaagatgggtgtagagtagaaaatcgatatacttgatagtatttgttaaggatcaataaggaaattttcagtggtataggagacaggaggatggaagaatgaaaatcgggatcatatcggacactcatggaaaattacatccaccggttctggagctgatcgcttcctgcgatgtggtcctgcatgccggagatgtggataacagtcagacactggaccagctctggatgcatctgaaaccaaatgcccctttttatctggtacgtggaaataacgaccggggatgggcggcgcgtatcgcgaaaacacaacggttttgtcaggctggtgtttcctttttcatggtgcatgacagaaaagatgtttcctgggacctggacggtgtacaggtggttgtcttcgggcacagtcataagtttaccgtggaagaaatcgacggaagactctggctgaatccgggaagttgcggcagaccgcggttcggcgcacctttgacattggcagtgcttacgatagaagacggagtggaaaaccaggagtggacggtggaaaaaatcacgatttccaaccggtatgtggaaaacaggagtatagtatggaaaaaaacacaaccaaaacagaagtaagagaaaaaatacaggaacttttaaaaacactgaaagcggagcaggaaaaaaagccgctgcgtctggtggagcagctgggatatctgatgtatgtccgcctgtttatcgaatcacagaagagggtcagcctgcaggagagctttccgtttgccggatttccaatggaatggataccgggagaggaagaagtggaggatggtcagcgcagctggcagctgcagtatcaggtacagtactgttcttccatggtggagcagggacattttatggaaactgcaagactggaagaaaacagtctgtggatgaaagaattatgtaaactcattgactggacagctgaccactgtgactgggaagaagggatgccacatctgttcggcgcgctgcttgaagagatgcttcgtcagatgtatgcctggggaactacaggattgtttctgatgccggagaaccttacggaagcactgatccggctggcagatggtcgtaatatcgaaaaagtctggaatccggcgacaagaaccggcggttttcttgcagcagcccacagacagtatccacagtggcagctatacggatgtgaagaagagaaaagtcagtggcagattgcccggatgctgcagttttatcatggcggcggtatggagggaatccgtcgggaagatccgctggaagccgaccgcatcgataaaaccggggagcgcacaccggaaggggaagtgccgacctacgaggaatacgatttgatcgtgaccaatccaccggtaggggaactgccgatcgaagaccaggaccggtactggatcagtaccagaaaagcacagctgcagtacatgcagatgctgatgaatcatgtgaaaaagcagggaatggtgatcgcggtagtcaacgagggaaccctgtttatgtacgatgcagagcagaaagtccgccagtatctgttaaatgactaccagatccagggagtcatttcccttccggcgggagcatttttaccctatacaggaagtaaggcttcggttctgatctttacaagagaagaagagattgacaaagagcagccggtatggttctatgagatacagaatctcggatacagcctggatcgtcgccaggaaagtaccggggtggatgacattccggcaatgctgacatcatgggagaaccggaaagaactggcagatcagtggaagcatcagttgaaggaagctgctgcgcacaatcagtgggaaaatccggttccggcacattgggaagaaaaatcctgctggtttgcaagtctggatacgatcgccaaaaatgacaataatctgtctgcgggaagatacaaaccatggaaagagcaggagacggttgtgaccgaatctccggcacagcttttgaaagaactggcagatctggaaatcgatacgatgaagaaagtacaggaactgatggagatggcgggggactatgagtaagaagaaaaatatgtacaaactggaatctctcgcccggctgatctccggaagaacgccggagcgggagcagaaggaatactatgcagagaccggaacaccatgggtcaagattgaaaatctggatcagggttatatccgggagacagcggaatacctgtccgaacagggaaaagaaaaggttaatctggtaccggaaaacagtgtgttattttccatcgtcggtacagtcggaaaagtaggaatcgccggccgggaacttgccacgaatcagcagatcgtatccctgatctttgatgagacccgggtgctgccactgtacggatattatgcactccggtatcatgcggaagagatccgcaaactgtccaatcagaccacgatggcgctgatcagcagaaaaaccctgggacagtacagaatctatgtgccggacagtctggaaaaacagcaggagattgtggataagctgcggcgttttgaagagatcaagctgaaaaaagaagagatgcgaagccggatggaacagtatgaacaggtattatttcagagaatctttgcctctcagctgcgatacggagaaaaggcgagactttgcaactatctgaaagaaccggtaggaaccggtattccgaaaaatgaagagccaaacggagaattcccctgtgtgcgtctggagaattttcggaagacttatctgacaggactccatgcaggagaaaaagcggagataaatgctggtgcagactgggcgatcgaagagaaataccgcgtctgcccgggagatatccttcttcgaaatggaaagctgattctggtagatcgggtggaagatccactgtatctggatcgtagtgtgctgcgtattgtgccggatcaggggcagattctgccggaagccttatatgcttatctgagccagtcctgtatgagtgaagttctctacggatccagaaaagagggcgataaccgaaaacgtccgattcgtgccgccgaggtggaaaagctgattctgccgcagttgtccatgaaaaaacaggaagattacagcagatgtctgaagaaaatccgtgagatcgagagaaatctggaccgggaaattgcactggcagaggcagcattttccggtatgggatggctgttgctgaagaaagaaccggaggaagaggctaagacaggtgcaataagcattgaagatgtggaaagtgttacgaaagcggagacagaagaatccacagggaaagatctggaaactatggcagatgcgaaaacttcggaaggtgcagccggtgaagcggagcagacagaagccgggttacagaaagaaaagtcgaaagtggtttcgggaaaaacagggaagaggatgcaaagaagaccggtggaactgtccgaagaacagaagcagacggcacatctgattcttggtgtgctctgctgctgggcaccgagagatgaacgaaccggtgcatactgtaagaaacggcaggagattttccggatcgcgcagccctattttcagccggcagcggtttcttttaccgataaaaagggacagcgggaatacctgctcgagaaggatttcctgacctatcgaaatgaggagttgagcaaacgatacgctacaccgatgtactttttacaggaacttttacaggaaagcgaaaacgataatccgcaggacgcccatttggccttccagggagaagacgggatcgctacggatgaactttgggattcagcacagatccggcagatggcagtgtgtggctgggagatactaatggagtattccgggctgggtgcatgcggatggctggtgcgtggagagaatgggaagtaactatgcaacagacagtcgggggacaaaacagttgcaaccgagaaaaggagacagaacatatgaaaccgaagattcgcatggtcggactggatctggacggaacggtatttaataacaataaagagattagcacgcataccagaagtgtgctgaaagaggcgatccgtcagggctgcatcgtgcttccggccaccggaagaccggaaatcggacttccgggtgcatttttggagattcccggtgtggaatacgcactgacttccaacggagcccgcattatccgtattccttccggggagacggtatatgaagaactgattccctgggaggtcgcattgcaggtgatcgaagtgatgaaacagtgggcaggagaatcatgcaactgggaaacatattttgccggtaatatttatgtagaggaagaaacgtatcattttgtgaaacatgaatcgatgagtcctgcgatggagcggtacatccgaagtacccggacacgccggaagtatctgacagagaagatccgggaggaaaagatcgggatggaaaagttgcatctgatctttgccgatacaagagaacgggactgcagagagaaggaactgcaacagatgtttccgaatctgagtatctgccatgcgacaccgtttaatattgaaattatttccggcagggctggaaaagggaacgcgctggtggccctgggaaagatcctcggtatcaaaagggaagaaatcatggcatgcggcgatgcgccaaacgactggaacatgcttgagatggccggacttccggtcgtgatggcgaatgcagatgaagagacgaagaaaaaggcagcgtttatcacaaagtcgaatgaggaagacggtgttgcttatgctgttgagcagtttgtgctaaaaaatggatgacagatttgcctgaatggcagaaaacagattggctgcggtatcaggtatggcaacgggaagaaaaaggaaaagcgaaggaaaatgggaagaaacagcacatacggaaaatgaaaggagtttatgcatgactttgaaacaacaacttggaaagctgaaatgtaagaactttctcttcctcacgattgcaggtatggtgaatgccttcggagtcacgatgtttattgccccggtggatctgtatgacagcggaatctccggaacatcgatcctgctgtcacagctgacaccggaatggctgtcactgtccttctttttgatggtattgaatattcctctgtttttatacggactcagaaaacagggtgtggtatttaccatctatgcgatttacacggtggtggtctattctttcggggcatggctgatcacagatgtactgccggtggatgtaagtatcgtatcgccacttgccggatcggatctgcttctctgcgctatttttggcgggctgatctccggtatcggaagtggtatggcgattcggtttggaggagcgatggacggcatcgaagttctcgccgtcatctttgcaaaacggctgggaatcacggtgggtacgtttgtgatggcatataatctggtactgtatattatctgcggatttgtgattcacagctggatccttccactgtactcgatcgtaacctacggggcagcgctgaagacagtggactttattgtggaaggtctggatcgatccaaagcggctacaatcgtcacggtgcatccggatgaggtctgcgcggcactctccgaagcctttgagtgtgggatgacgatcaccgaggcgaagggatattattcggattccccgaagacagtggtgtacatcgtggtaaaccgttttcaggttgggaagatgaaagaactggttcatgaaaatgatcgctccgcttatatctcgattgcagaaattgcggatgtgtacggagcaaatacggacaaagtctgaaacgacaaaatatcattgaggattgtgatagtacgaagtacggaacaatccggtatcaaaggggtcaaaataccttttgaccccaacatcatatcattattataagcagaaagtgaaaaaaatatggatggaaacattcttttgtggatacaggatcacttccgctgggagggcatgaactggttctggaaaggaatcacatccctgggaaacggtggatggttctggatcgtattatgtatcctgatggttgtacttgccaaaatctccggagaaaaatgttcaataaaaaatgaaaactgttcccgggcagtaatcggaagagccggctggtatggtctgttgtcgatgggagccggtgcactgatcaccaatgtgtgtctgaaaaatctggtagcacgtccccgcccctatgaagtggtagagggactggtgccgctgatcggcaaaccgacggattattcattcccgtcgggacatacctgtgcatcgtttgcctgtgcgctggtgttgtaccggattctaccgaaaaaatacggtgtacctgcagtgatcctggcatcactgatcgcattttcacgcctgtatgtgggtgtgcattatccgaccgatgtgctgggaggcatgtttgtcggaatcttttcttcctgtctggttctgtggatcggaaagaagaggacgaagaaataagaaaatcttaaaagaaacgtaattgtctgcccgtgtggtgttctttataataagagagaaaagaacgccatccgggcagaaagaggtttagaggggaatgggaaagaaaatattgaaattgttactgtatctgatggcagtggtcggagtgctcatctggctggacagtacagtaggactgacagaagaaggggcattgattatttttggcattgcattattggcgtattttgtgatgaaactgatcggctttttggtaaagaggcgcagaataagaagagaaagagcgcggaaagccagaagaaaacgtgagttgcgggaagtaaacaattacagggtaaaacaggaaacatccgttgcagcgacagcggcatcacaggcaaaccatcggaaacagcaaaaaatacataatcaaagcggtcataaagttcatatgacacggaaaaaaatagtctggaccgttggtttgctggccacattctgcatcgttgtgctggcagggaaaacctggatccggcagcacgagcagattccggagagtcttcttaacatggaagaaaaatatccggaggctacagattttgtaaaaaattatccgaagcgaagacactatcagacgatagatatttcatccgaagtggaagctgccagagaaaacagtgagataccgtattttttgcagtgggatgaacgctgggggtatgaaacctacggcagcgatttccttgccgtcaccggctgtggtccaacctgcctgtccatgatcacctgtggtctgaccggttccgaaacatggaatcccctggccgtagctcagttttcagaaaaagaaggctattacgttccgggtgaaggaacctcctggtccctgatgaccgaaggtgccggcaacctgggtctcgttgcagaaaatatcccggtaacgcaagaaaacatcctcgccgccctgcaatccggcacacctttgatttgttccatgtatcctggtgattttacctacacgggtcactttatcgttctgaccggtatcgatgaaaacggtgcaattaccgtcaacgacccaaacagccccgccaacaccaaaaaacactggtccatgaccgaaatattaccacagatccgtcaaacctggggataccgtacctgaacatacggtatccctttttgtatataaataatggaagacgtattatacagtctgttttaaaagtaaacagccaataccagcgaaagaggcggcaccggttgggtgtctgcagcactttgtgggcggttaggggaagctttgagatccggcacctacgcagacttttcacgagggtcagctgaacctcgtgaatcatagtcggagttggtgaatagagcgtgtctgaaaaatcatttccgcaatctgcaagccccagtttgcggtatattttaccctcattcggttgccgtagcccgctacgccgccctcattcggataaaatctcccacaaactgggacccgcagctcacgaaaagcctttttcagacacgctctagctcaaagttcccctgcccacgctgcagacacccaaccggtgccgcctctttcgcgtccgcctggaaaaaaattaaaaattattagcactccctcttgacgagtgctaaaatatgtgttatattgcaactagaacaaagaaaacaatgtgttccaaaaggagggacgcttatgaatatcagcaaatttacgcaaaaatcattgcaggctgttcaaaacctggaaaagaccgcatatgacttcggtaaccaggagatcgagcaggaacatttactgtacaatctgcttcatcaggaagacagtctgatcttaaagatgatcgaaaagatggagattaacaaagagcattttctgaataatgtggagaatgccctgaacgccagagtcaaagtatccggcggacagcaatatatcggacagtacctgaacaaggtactggtaagcggcgaagacgaagccaaagccatgggagatgaatacgtttccgtagaacatctgtttctggcaatgctccgttatccgagcccgagtatcaaaaaattgttccaggaatatggaatcacaagagaacgctttttacaggcgctgagcactgtaagaggaaaccagagagttacttcggataatccggaagcaacttacgatacactggaaaaatacggtcaggatttggtagagcgtgcgagaaatcagaagctggatccggtcatcggccgtgacagcgagattcgaaatgtgattcgtattctttccagaaagacaaaaaacaatccggtactgatcggtgaaccgggtgtaggtaaaacggcagccgtagaaggactggcacagcgaatcgtccgtggcgatgtaccggaaggtctgaaagataaaacgatttttgctctggatatgggtgcactggtagccggtgcaaaataccgtggtgaattcgaggaacgtctgaaagccgttctggaagaagtcagaaagagcgaaggtaaaatcattctgtttatcgatgaactgcatctgatcgtcggagcaggaaaaaccgacggtgcgatggatgccggcaacatgttaaaaccgatgcttgcccgtggagaactgcactgtatcggtgctaccacactggatgagtatcgccagtacattgaaaaagatgccgcattggaacgtcgtttccaaccggtaatggtagatgaaccttctgtggaagataccatatccatccttcgtggactgaaagagcggtatgaggtataccatggagtaaagattaccgatggtgccctcgttgcagcagctacactttctaaccgttatatctccgaccgattcctgccggataaggctatcgatctggtagatgaagcctgtgcactgatcaagaccgaactggattctcttccggcagaactggatgagcagcaacgtaagatcatgcagatggagattgaggaagcagcactgaaaaaagagaccgacaagctaagtcaggaacgtctggcagatctgcaaaaagaactggcagaatataaagatgcattttccgtacagaaagcacagtgggagaatgagaaacattctgtagagaaactttctacattgcgtgaacagattgaagatctgaatcgtcagatccaggtggcacagcagcagtatgatctgaataaagcagcggaactgcagtacggcgagctgccgaaactccaaaaacagttggagattgaagaagagaaagtgaaaaatgaggatctttctctggtacatgagagtgttaccgatgaagaaattgcgagaattatttcccgttggaccggtatcccggtggcgaaactgaccgagggagaaaaaacgaagattctaggtcttgaagatgtccttcataaacgtgtgatcggacaggatgaagcggtaacgaaagtgaccgatgcgatcatccgttccaaagccggtatcaaagatcctacaaaaccgatcggatcattcctgtttcttggacctaccggtgtcggtaagacagaacttgcaaaaactctggcacagacgttgtttgatgatgagaataatatggtgcgaatcgacatgagcgagtatatggagaaatattctgtatcccgtctgatcggagcacctccgggatatgtaggttatgaagaaggaggtcagctgacggaagctgtcagaagaaaaccgtactcggtagtactgtttgatgagattgagaaagcacatccggatgtatttaacgtactgttacaggtactggatgatggccggatcacggattctcagggacgtaccgttgacttcaagaatacgattctgatcatgacttccaacatcggttcttcctatctgctggatggcattggggaagatggaagtatcaaaccggaagcagcagagatggtacagaacgacctgcgtgggcatttccgtccggagtttctgaaccgtctggatgagatcattatgttcaaaccattgaccaaagacaatattggtggtatcgtagacctgttaatggcagagctgaacaaccgtctggcagatcaggagattcatatccgtctgacagctgcggcaaagaaccatatcatcgaaggtgggtatgatccggtatatggcgcacgtccattgaaacgttatctgcagaaatatgtggaaacactggctgcaaagatgattcttggtggaaaagtcggtcaggatgatacaatcgttctggatgtgacggatggtgagttgacagcttctgtacagtctgtataaaggagttttgagatgataccgaacgatccggtgatgttgctcagttatgtaaatacgcagctgagagattattattccagtctggatgctctttgtgaggataagggtattggaaaagaagaactggtggagaagatgaagtccattgagtatgtgtatgaggtggatcgaaatcagtttgtgtgataagggaagcattcctgcaaaaaaagtaggagtgcttctttttttgataagtcatttaaacaaagtattgacagaaagttaacatagtgctaatatacttcttgtataaattccatagtaacatatcaagtgcacctgcgaacatagttcgtcggtgagagagggaatcaggtgtgagtcctgagcgatccggtcactgtaatcagggaggaaagcccggtaggatccattgtaccgcaaggtatgagaaggagggtcgactgttgatctgtaagtcaggaaacctgcttgtatgtcgtaaggttaaaacttccgagtaaagttttacatcctgtttgtagtaaaaatgagatgtcagctttctgtcggggaaaagacatcttttttatatatttacaaaaacacgaacttatggaatgatcgaaacaggagcgtagtgtttcgagaccttgactatttgaatttatgcacgattaaacgacaggatgaacagaatcctgtttctgtagatctactgtatcatttacctccgcaaccaagtgatatagattcctcttggatcttgtgcagaagcaggatggtttcatccggttagccttgaaaatggaagcctgaaaaggcttctttttttgtgcttttcatgtgaaaaatctgcaacatatggctgcatagaaaaataacttttgcaattgaaagcactggaacttcatggtacactgagatagtaaagtaactgtaaaaacagctacggaaaacaaaaatggaggcaataatatggagggttttacaacgaaaaaacagcagtttgcaacggtatggaagatgcatactgcaggcgatgcacagtggtatccggcgcaggttccgggaactgtgtatacagatctgttaagaaacggacagatggaagatccgttctggaaggacaatgaatatagagcactggatctgatggaaaaagattatgagtatgtgaccgtgtttgagggaaccgaagcacaggaaggcgagagacagtggcttcgctttgaaggtttggatacgatctgtgatatctatctgaatgaagaaaaaatcggtaatacatataacatgcacagaacctgggagtttgatgtaacaggaaaggtgaaagcaggagaaaatatcctgcgtgtgtatttccattctccgctggagtatattaaagaagcatacgaaaagcagccgacacacggaagtgaagatgcgatggatggctttgtgcatatccgcaaagcacactgcatgttcggatgggactggggtgctcatctgccggatgcgggaatctttcgtccggtatatctgctgacgatgaccgaaggcagaatagacagcgtgtatatccgtcaggaacacgaagagggaaaagtaaccctgcattttgatgtgagcagaaacccgaaagaggatctcagaaaagagatcccggtgggaaaagaggcagatggctatacctatgaagtaactgtgacagcaccggatggtacaaagatcattgcaaaagataccccggaggatctggtgatcgaacagccgaagctctggtggccaaacggtgtgggcgaacagccattatatgaagtgaacgtaacgctggcaaaagacggacagccggtggacagatggacaagaaagattggtcttcgcacgatgacgatggatattcatccggatgagtggggcgagagttttgctcatcaggtgaacggaaaggatatctttgccatgggtgcagactatatcccggaagatcatctcctggggcgtgtgacaccggaaactacaagaaaactgttggaacagtgtaaggcagccaactttaacgcagtccgcgtatggggcggcggttactatccggaagactggttctatgatctgtgtgatgaactgggactgatggtatggcaggactttatgtttgcatgtgcagtctatgatttgacaccggactttgaggcgaatatccgggaagaatttattgataatgtaaaaagattacgtcatcacgcatccctgggactgtggtgtggtaacaatgagatggaaatgtttgtaaaacagggcgaatgggtaaccaaaccgagcgaggtgcgcgattatctcttcatgtacgagcgcgtgattccggagattctgaaaaaatacgatccggaaaccttctactggcctgcaagtccgtcttccggcggatgcttcgatgatccgtcagatccgaaccgtggagatgtgcattactgggatgtatggcatggaaacaagccgttctcggattaccggaattactatttccgctatgcaagtgaatttggattccagtctttcccgtcttttgagacaatcaaaacttttaccgatgatccggcagactggaacattttctcttatgttatggaaaaacatcagagaaatgcaggcgcaaacggaaagatcctgaattatctgcagcagacattccgctatccaaccgaatttaccacgttattatatgcttcccagatgttgcaggcagaagctatcaagtacggggtggaacatttccgaagaaacaggggcagatgtatgggtgcgatctactggcagttaaatgactgctggccggtagcttcttgggcatcggtagattatgagggaagatggaaagccctgcattattatgcaaaacggttctttgcaccggtgatggtatcctgtgaagaacagaactggatgactgcggaagcgaatatgaaccgtgaacattttgtatatgaaaaatctatccgcctgaatgtgaccaacgagaccctggaagataagaaagttctggtaaaatgggcacttcgaaacgccgatgcatctgttgtgaaagcagaggagcgagaagtaacggtgccggcactttccagtgtatggctggataaagaagaatacccggatgtggatgtattcggccagtatgtaagctatgaggcatgggagggtgatacctgcatctctgagggcagcgtgatcttctcttatccgaagtacttccattatctggatccgcagctgtcatatcggatcgagggagacgagatcgtagtcagcgcgaaagcctacgcgaaaggcgtggagatcctgaatgcgtccgaagatctgatcctgtcggacaactattttgatatgagtgcgggagaaaagagagtaaagattcttggcaaagcatcaagaaaagtggaagatcctgcagactgggagaaccagataaaagagcagcttgcggacggtctgaaactgcgaagcgtttacgatattcgataaaagatgttggggcaaaaagcattttgcccctttgataccggattgctccgtactttgtactcccgcaatcctcaaaaacattcgtaatccgctcatttttcttcgaaaaatggctacttactcatgttttggcggatcccaagttcataaatcttcgtgcaagtaagcttgcgtcagatttccgaacttttgatcctggtatcaacaaaaaccttgacaaaagaaaaaaagcctactatagtaatgtcagccgaaactgtttcaaaaacaggaagaggtacagagaaaaaggtagtgacaaagaggagtagatattgtaccccgcaaagagagggaacttcgtggctgtgagagatccccggcaggcaatatcgaaggtagctttggaaccggaagactgaacgtttttgcttgtaactgtgaagatgctgaacagttaccgttttcagacagaaaatcagtaagctttcacggctgatccccgttatcggataatgagatgtatggaacgcttgttgtttcatataagcaaggtggtaacgcgagacattcgcccttcacacagatgagaacatctgagtggagggcgtttctaatcttcaaaaagacaaaggagacaaccatgagtaaagaactggcaaagacttacgatccgaaaggactcgaagaccgtttataccagaaatggctggacagcggctattttcatgcaaaagtaaacaaagcgaagaaaccatttaccattgttatgccgccgccaaacgtaacaggacagctgcatatgggccatgcactggatgagactatgcaggatatcctgatccgtttcaagaggatgcagggatacgaagcactgtggcagccgggaaccgaccatgcggcaatcgctacagaggttaaggttatcaacaaattaaaagaacagggcatcgacaaaaacgagatcggaagagaagaattcttaaaacatgcctgggcatggaaagaagagtacggcggaaagattattaaccagctgaaaaaactgggcgcatctgcggactgggaaagagagcgtttcacgatggacgaaggatgttccaaagcggtgcaggaagtatttattcgtctgtacaacaaaggatatatctacaaaggatcccgtatcatcaactggtgtccggtatgccagacctctatctctgacgcggaggtggaacatgaggatcaggacggattcttctggcacattaactacccggtagttggagaagaaggaaaattcgtagagatcgcaacgacccgtccggagacacttctgggagataccgcagtagcggtaaacccggaagatgacagatataaagatctggtaggaaagatgctgaaactgccgctgaccgaccgtgagattccggtgatcgccgatgcgtatgtagacaaagagttcggaaccggatgtgtaaagatcacaccggcacatgacccgaatgactttgaagtaggaaaacgtcataatctggaagaaatcaacattctgaacgatgatgcaaccatcaacgatctgggtggaaaatatgcaggcatggatcgctatgaagcaagaaaagctatggtgaaagatctggaagatctgggactgttggtaaaagtagtaccccacagtcacagtgtaggaacccatgatcgttgtggtacaaccgtagagccgatgatcaaaccacagtggtttgtaaagatggacgagatggcaaaagcagctattgacactttgaaagacggcgatcttcagtttgttccggaacgttttgataagacttatttgcactggctggagaacatccgtgactggtgtatctcccgtcagttatggtggggacacagaatcccggcttattactgtgatgactgcggtgagaccgtagtggcaaaagagatgccgaagatctgtccgaaatgtggaaaaaatcatttccatcaggatgaagatactctggatacttggttttcctccgcattgtggccattttccacactgggctggccggacaataccgaagagatggaatatttctatccgacagatgtactggtaaccggatacgatatcattttcttctgggttatccgtatggtattctccgctctggaacagaccggaaaagcacctttccatcacgtactgatccacggtctggtaagagattcacagggaagaaagatgagtaaatctctgggtaatggtatcgatccgctggaagtcatcgacaagtacggcgcggatgccctgcgtcttacattaatgaccggtaatgcacctggtaacgatatgcgtttttactgggagcgtgtagagtccagcagaaactttgcaaacaaagtatggaacgcttcccgttttatcatgatgaacctggaaaaagcggaagttccgtcttctatggatcttgcaaacttgacggctgcagataagtggattctgtgcaagttcaatgatgtagcaaaagacgttaccgataacatggaaaaatttgaactgggtattgctgtacagaaagtatatgactttatctgggaagaattctgtgactggtacatcgagatggtaaaaccgcgtctttataacgacgaagataccacaaaggcagcagcactgtggacactgaaaacggttcttggcggtgcactgaaactgctgcatccgtacatgccgtttatcacagaagaaatttactgtactctgaatccggaagaagaatccattatgatcgcttcctggccggaatggaaaaaagagtgggatttcaaacaggatgaaaaagatgttgagatgattaaagaggcagtcagaagcatccgtggcgtacgtaccgagatgaatgtaccgccgagcaaaaaagctaccgtatatgtagtggcagaagatgcatctgtaagagaaacctttgaaaagggtaaaatcttctttgcaacactggcatccgcaagtgaagtcctggtacagtctgataagagcggtatcgcagacgatgcagtatctgcagtaattccgcaggcggtaatctatattccgtttgcagaactggtggatattgaaaaagagatccagcgtctggaaaaagaggaaggacgtctggaaaaagaattggcccgtgtcaacggtatgctgagtaacgaacgtttcatcagcaaagccccacaggccaagattgatgaggaaaaaggaaagctggaaaaatacacacagatgatggaacaggtaaaagaaagactggcacagctgcggtaagttatgcgagcaacgagtcaaagtccatgcaattacatgagacaccggtgattgccgcgatatcggttcggaacatgtagcgcgtgtttcgaaccgatttttggggcgtatctgaatacgatgagatttcaggtacgcttctgtatttacgcagcagataggagcagaaaaaaacatgaaaaaaatcaatctgaaaaaacctacccgcaatcaggtgattcggatctgtaacttgttgtctgtacccctgcagtttctggggtgctgtgtactgtatctggtaatcgaggcgctttcccgtcattcgctgcgggaagcctggcagtatatgacaggaagccctctgatctttttatacaatgcatttttaatttttaccacaagccttgtggtatatctgtttaaacacagaatccttgccagaactatcgtgggatgtttctggtttattctgggatgcgtgaacggattcttactgttaaaccgtgtaactccatttaccggaccggatctgaaactgattaatgacgcaatgcgtattctgaacaagtatctgtccccgggactggtggttgccgtactggtcgggcttggtgtcctgctgttatttttcatctggatgttccgaaaaggctggaaatttcagggaaagatgcgctactggctgaatattccgctgattgttgtcggtgtggcagcttttgcgttgacaagtaagctggcgattgataatcgtctgttatccacgtattttggaaatattgcgtatgcatatcaggattacggttatccatactgtctggcagttacaattttcgataccggaatcaatgagccgaacggatattctaaagcattgatggaagatatcgtgaacagtgaaggtgagatcaaggaaaccaagaaaaagaatacggatgtcaacatcctgtttttacagctggaaacatttatcgatccgaccgaagtgaattttctttctttttccgaggatccgatcccgaacttccgaaagttaagtgaggaatattcttccggctactacaaagtgccagcagtaggtgcgggaaccgcgaatacggagtttgaatctatcaccggtatgagtcttcattattttggggcgggagagtatccgtataagacaattctgaaagagacgacctgcgagagcgcagcctatgatcttaagaagctcggttacagtactcatgcgatccataacaatgaagcgaatttctacggaagacgaaccgtattttccagacttggatttgacacctttacttctgaggaatatatgccggacatcagtgataccacaccgatgggatgggtgaaagatcatattctgactgatgaaatttttaaggccatggaatccacagaaggtccggattatgtatatacgatctcggtacagggacatggagattatccaaccgaaccggtactttctgatccggagatcaaagtaacgggagcggaatctgaagagaaaaataatgcatgggaatattatgtaaatcagcttcacgagatggatcagtttgtcaaagaactgacggatcgtctctctgaattggatgagcgggtggttctcgttatgtatggagatcatctgccgaccatggatctgaaagtggaggacatgaaaaaccgttatctgttccagacaaaatatgtgatgtggagcaacttcgacatgaagaaaaaagacaaaaacattgccgcttaccagatggcagcggaagtgtttaatcgtctgggaattcatgagggaacggtctttaactatcatcagaccagaaaaggaagcaggaattatcagctggatctgcaggcattgcagtatgatatcctgtatggaaaacagtatgtttacggtggtgagaatccgtttgaggcaacaaagatgcagcttgggatctatcctgcaacactggaacggctggagtccatcggaaatggaagctattatgtctatggaaccaattttacggcagcgagcagactggagattaacaaagaactgcaggaaacacagtacatcagtccgacacagctgctggtgcagaatgtggaactggcagatggcgatcaggtgtcagttgcgacacagagtaacagttccacaaagaaagtgctgtcacgaaccgattatcttacatacaatgaggataatggagaactgatgtcacaggaaaactatcaggcaaaaaaatcagcaaaagcgatgcttgagcggctgaaggaacagcatgcagagcaaacagaggatgacgggcaggcagcggaagaaacgccaacagaggaaacaacaccggaactgtctctgacaccggcacctgcgtccacaccggaatcctgagaaaaaaccggcttccggtattacggaaactggaaaaagtcaaaagttgcgacataatttacttgattattaccaccactattatataatggaaagtaccgggaaaccggacaaatacattagataaagtggtggtaattttgaattatagagaaatcgtagattatattgaagagataccgaagtttacatcgaaaaatccgctggatcacacgaaggcactgctgaagtgtctgggcgatccccagaatcagatgcaggtgatccatgtggcgggaaccaatggaaaaggaagcgtctgtgcatatctggattccatgctccgggcaggaggttacaaagttggtttatttacttcgccacatctggtaaagatcaatgaacgttttaagatcaacggagagatgatttccgatgaacggtttgtaaaagcttttgaagaagtacagaagattattaaaaaggcacaggaagacggactggatcacccgagctattttgagacactgtttctgatgggaatggttgtttttaaagaagcagatgtggattatgtggttctggagaccggccttggtggaaggctggatgcgaccaacactgtagatcatccgctggcatgcatcattacttctatcagtctggatcatgtggaatatctgggagacaccatcggaaaaattgccggtgaaaaggcaggaattatcaaaccacaggttccggtgatctatgacggacatcagccggaggcttccgaagtgattgaaaaacgtgccaacgaactgggttccccggcatttgcactgaccgaggacatgtatgaaatgcagaaaaatacaagagagggcattgatttttcctttcattgtaagtattataatactgttcaactgtcgattccatatattgcaccgtaccagatgatgaatgcatcgctggcgtttttcacgatggaacagctgcgggatgtgcataagattccgttggaaaagctgatcgagggattgaaaaatacgcactgggaaggtcgtatggagactgttttaccggatgtgatcgtagacggggcacacaatgcagatggtgtggcgcggtttgtggagacggcgtgtcattttggaaaagaacatccgatcacgctgttattttcggcagtggctgataaggattatgaaaaaatgatccgtacagtcagcgaaaagatccgtccgagagcagtagttgccacagaagttggcggcagcagagttgtaccggctacggaactggcagagtttttcaaggaagacggatgtgaacaggtgatcgccgaggcaaatgtaggagaggcatttgaaaaagcgttgtctttaaagggcgatggaatgttattctgcgttggatctctttatctggtaggtgagatcaaggagtaccttcagaagaatccagaagcataggagagaaaagaatgattaattacgaagaggaattgaaaaaattcaaaccctgtcttgatgtggacgagatcgagagtgcggtatatacacgggatctgaccgatatcgtggatatcctgcaggagatgctgaaaacagagaaaaaagaccggaaagaataaggggtaaaacatgaattgtatgaattgcggagttccgatcggaaagtcggattactgtacgagctgcggctttcatgtggaagtacagaagaaaatctggcagttgtccaatacctattacaatctgggactggacaaggcacagatccgggatctgtccggagccattgatctgttaaaacgcagtctgaagtttaacaagctgaatgttcaggcgagaaacctgctgggactggtatattttgagaccggtgaggcagtggcagcgttgagtgaatggatcatcagtaaaaatatcatgccggagaataacatcgcttccgagtatatcgaacggctgcagcagaatgccaacaaactggatgtgatcaatcagactatcaaaaagtataatgacagtctgcaatgctgtcgcaaaggcagtgaggatgtggcggtgatccagctgaaaaagatcctgaatcagaatccgaagctgatcaagggatatcatctgctggccctgatctacctgaaaaaagaagagtatgaaaaagcaagacgaattctgaaaaaagcggcgaagatcgataagacaaactccacaacactgcgctttttgcgggaagtagacgaacagaccggaacaattaccagcctggaaccaagaaggtgggcatttggtctgcgtgagaaggaagaaaaggtttcgggtaatcagtcgattgcctatcggacagaaaatgatgtggtgatccagccaccgaccttccgtgaaagttccatggcagcgacactgctgaatcttggatttggttttctggtgggagcctgtctggtatggttcttgatggtacctgcaaacacacagcggatcaataaagcggcaaacgaaaaagttgtaagctacagcaacactatggcgacacagtctgctgagatgaataagctccaggaacagattgaccagtctgaagagacggtggcatctgcccagcagcagattgaggatgcccagaatcaggcaagcagttatgagaatctgattaaagcatatgccgcttttcagagtggaaattatacttcggcagcgaatgttctgcagaatgtgcaggcagatctgctgtctgtagatgcaaaagaaatttatgattcaatttacaagagtatccagtcaacgatgaagaataatctgaaaagtcagggtgaacaggcattttatgccaaggattatgagacggcaattacagatttgaatcaggcactggagatggatgacagcgattatgaagtattaaatctgttggcgcattcttatcggcttgacgaacagtatgataaagcagtggagattttccagaagatcgtagaccagtttccgggaacaaaacgtgcttccaccgcacagaaatatattgataacggtggaaagggatttgacagcgttggtcagaaaaacagttccggaacaggaactgcacagacacaggatcggacagggaatcaggagactgtttcacaagatactgcagaacaaagcagtgcaggtgatacggcagatacacagaatacaggcgagaccggagccgatcagaacggcaatggaggagaagccgaaggaacttccggagaaaacggacaataagagaaacctcaaaacgggggaaatacaaaagaatttgtatttcccccgttttttggctttacaggaaattgctttcgtaaagccaaaaacgctccgcgaggatgtgccaaggcacattctttgttctaaagataagaaaccgttataaataatcagaaaaggggaggatatttatggaacaatttcaggtgaaggggaggactctggtcatacggatgccgaaagaactggatcaccataccacggggcagattccgggaacagcagatcgcatgatcggcgagaagaatattcagcggattgaatttgattttcgagacaccggattcatggacagctcagggatcggagtgatcatgggacggtatcaaaagctgcggctgcttggaggcagtgtagcagtgacccacgtcagcgatcgaatctggagaattttgcatcttgcaggagtgacaaaggtgattgaagtagaaaaagaacgaaactggaaggaaagcaaataagggggagaaacgatggaacagaagaatgaaatgatgattacgtttgacagcagatccagtaatgaatcatttgcaagagtggcagtagcggcgtttacgacacagttaaatcccaccctggaagaggtggctgatatcaagaccgctgtatctgaagcaattacaaatgcaattattcacggatatgacaaccaggtgaaaaagatccggatccgctgtcgagtcagtgaccggaccttgtacgtagaggtggaagatgacggaaagggaattgcagatgtgaaaaaggcgatggaacccatgtatacaacaagaccggatctggatcgctccgggatgggttttgctttcatggaagcatttatggatcaggtggaagtggaatcggaagcgggtgtgggaacaattgtccggatgaaaaagacaatcggacagacacagcagccatttgcataaaaggaggccctatggagcgtaccctcagattgatacagagagcacacgaaggggataaggaggcgagggacatactggtggaagagaatgtcgggcttgtctggagtattgttcgccgatttcaaaacagaggtgtggaatcggaagatctgtttcagatcggaaccatcgggctgatcaaagcggtggataaattcgactgcagctatgaggtttgcttttccacctatgcagttccgatgattgccggagagatcaaacggtatctgcgagatgacgggatactgaaagtaagccgttccctgaaggaaacagcggggaaagcctatcggatccgggagcagcaggaaaagcagacgggaagagagccgactgtccgggagattgccgggatactgggaatcccaccggaggaactgatggaggcgatggagtcttatgcgcaggtggaatccttgcagcagacaatttaccagggagaaggcaataccatccttctgatagacaaactggaagaaaaagtgaaccagagtgaacaggtgctgaacaggttatttttggaagaaatccttggaaaactggaaggtgaagaacgggaactgatttatcagcggtattttcaggaaaaaacacagagtgtgattgcaaaagagatgggaatttcacaggtacaggtctcgcggatggaaaagagaattctgagaaaaatacaggaggaagtatagaggattcattttgacacatactacttacaaaagaaaggaagtggtaggatggcaggaaaaaaatggtggatctggctgcttgcgattctcacagcagccggagtactggtggtgcttctgatgcagcagaatatgccggagaagcaaaaaggaggaaccctggtacaaagacaggaggcaacgtgctatgggtgatgtactgtatatacagacagataaaaaccggaagattacagatccacatgtcaggcttggtgatatctcagatcttacaagcaataatccggaagtattgcaaaggtgcaaggtgcttcgggtactgactctggagtcggggaaatatggcagatatgcggtttcggtcatgaaactgatagaactgatccaggaaaaagagaaacaggtggaagtggttcatgtcggtgaaccgcagtttatcctgacgtacgaggatccggctggaaaaagtgagaggatgagctggttgaaaactgcgtttgtgtgtctggtcacattttttggcacgatgttttctattatgactttcaatacggatgtagatattccaaaattgtttgagagaatcagcagccagtttacttcagatccaagaggactggcgattctggaagtgacgtattctgtggggatcggtattggtgttgtatttttctttaatcattttggaaaatggaagattactgaggatccgacaccgatggaagtggagatgcgtgcgtacgaggagcaggtagatcagacgattctggagatggagagcagaaaggagaacaattccggatgagagaaatctttcttggcatgctgggactttgcatgggaacaacgattgcaagtggcgtggtggcatttattataagccttggaattgttccaaggtttgccgggattaccggaagtgccgcacaggtgcgtctgtatgaggaatgctccatgctgggggcggtgcttggcaatgtggtttttctgtatcagcgagcattgccactgggtaatccgggacttgcagtttacggaagcttttccggaatttttcttggaagctgggtggtggcactgggtgaggtggtgaatatttatgcgattttgattcgaaggatcggtcttgtgaaaggaattggactggtaatcctcagcatggcacttggaaaagtggtgggttctctttggtttttctttttctgacgggagatcaataaccgaaaaaatgataaatccggggataaaaccaggaagcccggaagatactgagtgtgtaagaaatgaaaaacagaaaaaagacaggtaaaattacctggatatgaggatgaaacgatgcagaaagacagagaaaaacagcagttatatgaagaatatgtcaaaaaggtgactccaacgcacagtttgcctgccaatatggtaaaagcctttctggtgggcggtctgatctgtgtgtcaggacaggcggtcactgaatgggcactggcagcaggtatggatgagaaaacagctggaacctggtgttccattgccttgatctttctgagtgccctgactacgggtatgaacctttatccacggctggcaaaatggggaggagcaggcacccttgtgccgatcacaggatttgccaattctgtggcggcaccggcagtggaataccagaaagaaggacaggtatttggaatcggaagcaagatatttaccatagcgggaccggtgatactttatggggtgctgacctcatgggtgttgggtctgatacagtacgtggcagaaaggtggtagcagatggagatcgggaaacagagtattcggttggaaaagccggtctatgtggaaagctgggcatcggttgttggaaaaaaagagggggaaggtccactggctcctttctttgatgaaattgagacggatgatcagctggggcaggataactgggaagaagcagagagtatgctgcaacagaaggcggcgaggctggcaatcaaaaaagcaggatgctgtccggaagatatacgaatcatcttcgcgggggatctgctggcacagtccatcgcttcttccttcgggatcggcgaactggagcgtccgatgtatggagtattcggggcgtgttccacgatgggtgaagcactgagccttggggcgatcacagtttcggcaggccacggagaacgggttctggcagtgacatcgagtcattttgcaacggcagagaaagaatttcgttttccgctgggttacggaaaccagaggccattgtccgcttcctggactgttacgggaagtggtgcctgtgtgttaaacaggaaaaaggggagggtgaagatcacggggcttaccatcgggaaagtggtagactatggattaaaagattcccagaatatgggagcatgtatggcaccggcagcttgcagcaccatagtacagaatctgaaagactttggaagaaaacctgaagagtatgatcagattattaccggagatcttggttatatcggacagcagatattactggaccttttggaaaaagaagggtatcaggcagggaaaaatcacaaagattgtggaattttgatgtacgatcagaaaacacaggatacccatgcgggaggaagtggctgtggctgcagtgcttctgtacttgccggttatatcctgccaaagattgcctgcggggactggaaacgggtactttttgtgccaacaggggcgctgatgtcaaaagtgagcttttatgaaggaaacagtgtgccgggaatcgcccagggcgtagtactggaatgggaagaaggagaggtggaacagacatgctgatgaattatatccatgctttctgggtaggcggactgatctgtgcactggtgcagatccttctggataagaccagactgatgccgggaagagtcatggttcttctggtatgtgcgggaagtgtgctgagtgctctgcatttgtacgaaccgttggtggattatgcaggtgcgggtgccagtgttccgctgatcggattcggacatttgttatttcagggtgtgaaagaagaggtggaacaggtgggtattctgggtgtatttaccggagggttaaaagccagtgccggaggtatcagtgctgcgttgattttcggatatcttgcgagcctgttttttcatccgcagatgaaaaaataaagaagaaagagaccttcagctcttgccacatacggaaaagatatagtataataatatggtttatgtgtaagtgccagcgggatcgatacaaagatcccgcaacagaaaatgaaaaggtgatcaatttgagagaagaagtaatcaaaagactggaacagacagtgggaaacgatcagtttctgcggaatgaaccaatgaagaaacatattactttccgtgtaggaggaccggcagcatgttttctgacgccatccacaaaagaacagattgaagaaatcgtacatatctgtcaggaagaaaagacgccatactttattcttggaaatggcagcaatctgctggtaagtgatcagggatatgacggagctgtgttgcagatctataaaaatatgaatcaggttgcggtgaatggagaacagctgcaggtacaggcaggagcgctgttatccgctatagccagaaaggcactggatgcaggacttaccggcatggaatttgcagcgggaattccgggaactctgggaggcgctgtagttatgaatgcaggcgcttacggcggggagatgaaagatattctggaatccgtcactgtgctcacaccaaagggagaacagaagaaactgtataaagaagaacttcagctgggatatcggaccagtgtggtaaaagaaaagggttatattgttctggaagcggttctgaatctgaaaaaaggagaaccggaagcgataaaaagccgtatggatgaactgaaagagcagcgtgtgacaaaacagccgttagagtatccaagtgcaggaagtaccttcaaaagaccggaaggatattttgccggaaaactgattcaggatgccggccttcgcggttatcaggttggtggtgcacaggtatcggaaaaacactgtggctttgtgatcaataaagaaaatgcgacagcgacagatgtggtaaatctgattcacgatgtacagcggatcgtatatgaaaaatttcaggtgcagctggatacagaagtgaaatttcttggggaattttaaaagcgaaagaggagcaacatgagatttgtaattgttacgggaatgtccggtgcgggaaaaagtactgcactgaaaatactggaagatgcaggttatttttgtgtggataaccttccgattccacttctggaaaaattcgcacagtttattgtggaaggaaactcgggaagtatccagaaggtggctcttggagtagatgtgcgaagcggcggcgggatggaaggagtggaaaaagcgctggaagagatccggctgacaggacttgaatatgagatactgtttctggatgccgaagatgaggtgctggtaaaacgctataaggaaaccagaagaacacatccgctggccggaagcggcagagtggagaacggcatccgggaagaacgcagaagattaaaatatctgaaagagcatgcggattatattctcgacagcagccagcttctgacaagagaactgaaggcggaactggataagatcttcgtgaaaaatctgggttttaaaaatctgatgatcaccgttttgtcttttggatttaaatacggaattccatcggattcagatctggtattcgatgtgagatttttgcccaatccatattacattgatgaactccgtccgttaagtggaaatgacaaaccggtcagtgattatgtgatgaactgtgaagcatccagaatttttctggataagctggcagacatggtttcattcctgattccgaactatattctggagggaaagaatcaactggttgtcagcatcggatgtaccggtggaaaacatcgttcggtgacactggcaaatgcattgtatcagcgtctggaacagtcagaagaatatggagtacggattgaacacagagacattggtaaggatgctatccgaaagaaaatgaatgaagtgaggtaagagtgcatgtccttttccggtaaagtgaaagaggaattatcccggcagatatccacggcacgtcattgccagattgcagagatcgctgcgatcttaagtgtctgtggtcaggtcagtatctcggccaacgatcacttttgcgtgaccgtacatacagaaaatgtgtctgtggcaagaaagtactttacattagtagaaaaaacatttaatatagaagctgtaattcacgttcggaagaatgtttatctgaaaaagtccaatgtatacagggtagaagtaccttcccatgaggatacggttcgaattcttcaggccaccaaatttatgtcgccggaacaggagattgcagatgacctgtctgttatgagccgtctggtgatacaaaaagaatgttgtaaaagagcatttttgaggggaacgtttttagctgcaggttctatcagcgatccggagaaaggatatcatctggaaattgtctgctccactatggaacgggcggaacagatccagtctatcatgaaagaatttgagctggatgcgagaattgttacaagaaagaaaaaccaggtggtttatctgaaagagggatcccagatcgtagattttctgggagtggtagaagcaggaatctctctgatgaatctggaaaatattcgaatcaggaaggaaatcagcaacaatattaaccgtaaagtgaactgcgagactgccaacatcgggaaaacggtttcggcagcagtaaaacagatagaagatatcaggtatattgaaacacatgtgggcttctcacaactcacggaggagttggaggagaccgcagtttgtcggttacgttatccggaagcgactctgaaagaactgggagagatgatgaatcctccggtggggaaatcaggagtgaatcacagacttcgtaaacttggaagaattgccgatgaactgcggggaaataaggaggattataatgattaagaaaccaattacaattcagatttccaatggattagaagcaagaccggtagcgatgcttgtacaggttgccagccagtatgaaagcagaatccaggtggaaagcggagataaacatgtcaatgcaaaaagtatcatgggtatgatgacacttgggctgaatgtaggtgaaagcgttacaatttgtgcagaaggtacagatgaagaagcggctatcgaaggaattgaaaaatatctgacaagtaagtaatagataggtaatttgccaattatatagcgaacaattaactgttcagtaccttcacagttacgagcaaaaatgcatttaaacgataaaaacacgctttgcgagtttttatcgttatcgcggcactcctcaaggttccgtgcaagcacggactttgactcgttgctcgcgtaaatcaccttcggtgatggcattttggcttgtatgtctcgggattttggcatattcatgccaaaacacctcgcggtacagtggctactgaatagttacgcgagcaattacaaaagacagggacgtccgaagagaatgtccctgtcttttgtaattttaaaataattcttttacccggaaacggtaactgtaaaagtcttcgaatccaagagaaagatacagccgcttggcaggagtattcccctctacgacctgcagataagccccggtcattcccagctcttttccgcgatttaacaaagaagtacaaacggaacgggcatattgatgtccgcggtaatgaggatgcacatggatcgcatagattcccatgtaggaacgatccaaaatgccgagtccgatagcgacaatctgtccgtcgctattggtaatggaagcggcaagagtgtcttttggaattgcatggtacatagaaggtacaatctgacgatggatggcactggttgtactttttaaggcaaacaacgactgaatccaccggtcattgatggtacgttccagccgcacactgacaggtggcatggtgatctgccagggagccagatccagggtcattacttccgtgacgtgttgcactgcatatctgcggtcgatcagccgcttttcaaaatcatccggaagaagaggcgtgatcttgaagatggaaggcgttccccagcgatggtaagcgtcttcgcagaaattaattttttcttcgatagggatcgaggatggtccaatctgttccacacagttggttctgtgagtataaaaataagaaaaacgcagaagccatccgtcatagagctgaatctgatgagagggccacgcgttcaaagaaagatcttcgatcattttgatggtgggtttcatagtaaatacctccgtatactttcattataataaagaagaaaaatacaggcaacagaaaataagaaaaaacttacaaattttaaaacaggttgcagaagctgttaaaagaggatataataaggggcatgatatgaatactgccctaaaaggcagtattatcagtaagaaagtatctggaaatgtggaaagcggagtttacagataggaaaacagatgaggagagtagatcatgtcgaaggttttaaaaacgattgttaatgtgatcctgttttgtgccattgtggttgcggcgggtcttttgattccaccatttgcagggattactacggtgatggtggatgatgtcgatatgcagacaaatctgccacagggatccgtagcctatgcagtggagaaggatcgcagtgaactgaaacagggagataaagttctgatcagtcaggaaggcagacaatatgtatatgtggtagacagtatcgatggcagcagtgtggtactggatgatcagttgagcacagatggtgggactacacagcaggagctgggaagcacggttcagaaagttatgcttgttgtaccggtgattggttatgtatccatggcacttcgaagtacagaagggctgattattgtgggacttgctgttgtatttgttattatcctgtttattcttgcggaggtctggaaaaaagatgatgacgaagaagaggacgaggagaatgaggatgcgcaggaagatgagtctgaggaagaacaggaagaagaacctgcagtaatgtccagacggcaaaagaaaaaagcaagaaaagcagataagaaaaagcagaaacaggaagaaaaagccgcagtagctgaagcgaaggcaagggcgaaacgtgaacgacaggaagccaaacttgccaagaagaacaaaaaggctcatatgatggatgagtcagagcaggaaccagaagcgatacctgcagagccgatggaagagacacaggcagccggcagcacacaggaaatcgttcttccacaggaactgatgcaggaagaacagagcgcaggaaacacacagaaaatcgtattaccaacggaagaaactcaggaaaaacaggaatcgacagacgaaacggaagatccggataaaacacttttgcaagaaacagcaagtctgttcgctgctgatatcgccagcatgatgagtgagaatcagacgaaagagacagaggaaccggaagagacagatccattggattcgacagagcagacacagccggtagttcttggggtggtatcggaagaaaaacaggagacaggagataagaaacttgcgatgccggtgtactcaaaagaagaacttcttcagaaggctgaagcggatggggatgagccggaagtaatcgaagatgaagtcagcggagttaccctggtagattattcagacgtcctgtaaaaataagaaaataaaaatttttgaaaaaaatttgaaaaaccccttgcatttgcgaggggtttcgtttataataacccatgttgtgacattgatagcgatgaagcgcgaggttgctgcactaattgcaggttttccgtggagcgaatgtcaagttaagaaactggcgacaagtcactgtatacatgttaaatacgtccaccagaagtgtggaaaaccgcgtggaagtccggaggacacacacgggaaagtgtacagtcaccgcttgtcgtactcgtaaagtgcgaaaaggaggcgactttttttatggcaagtcaagtaatgagaattattctgaaagcttatgatcatcagctggttgatgcatctgcaagcaaaatcatcgaaactgtaaaaaagaacggatcagtagtgagtggaccggtaccacttcccactaagaaagaggtagtaacaatcttacgtgcggtacacaaatacaaagattccagagaacagtttgagcagagaactcataaaagactgatcgatatcatcggaccgacacagaaaactgtggatgctctggcaagactggagatgccggctggtgttagcatcgatatcaagatgaaaaacaaataatttcatcgaaaagaattatccggaaaagttagatatagaagcaacacattcttaggaatcaacatcccgtatgggttatagtgttccacttatatcggctgtttctaggatgaacacccgggttggtgttccgctgtagtttaaacaggaggtaaaaagaatgaagaaagcaatcttagctacaaaagttggaatgactcagattttcaacgaagatggagttttaactccggtgactgtattgcaggcaggaccttgcgtagtaactcaggttaaaactgttgagaatgatggttacagtgcagtacaggttggttttgttgacaagagagaaaaactggtgaacaaaccaatgaaaggacagtttgacaaagcaggcgtttcttacaagagattcgttcgcgaattccgtttagaagatgctgaaagctatgaagtggctcaggaaatcaaagctgacatctttgcagcaggagaaaaagtagatgctactgcaatctccaaaggtaaaggattccagggcgcaatcaagagacacggtcagtccagaggacctatggctcatggttccaaataccatcgtcatgcaggttccaacggtgcttgttccgatccgagccgtgtattcaaaggtaaaaagatggctggacacatgggtaacaaaaaagttacagtacagaatctggaaatcgtcagagtagatgctgaaaacaatctgcttctggtaaaaggtgctgtaccaggtcctaaaaaatctttagtaacaatcaaagcaaccgttaaaagcgcaaaataatttaacggatgatcggtggacccgatgccgcgaggcatgattcttgaaaaggaggaacacacagatgtcaaacgtatctgtttataatatggaaggcaatgaagttggcacactggaactgaacgacgctgtgttcggtgtagaagtaaatgaacatcttgttcatatggcagttgtgcgccagctggcaaataaacgtcagggaactcagaaagcaaaaacccgctctgaagtaagcggaggcggaagaaaaccttggagacagaaaggaactggtcatgcaagacagggttcaacaagagctccacagtggacaggtggcggagttgtattcgcaccggtaccaagagattactctttcaaaatgaataagaaagaaagaagaattgctctgaaatctgctctgacaacaagagtacaggaaaacaaactggtagtcctggacgaactgaaattagacgctattaaaacaaaagatatgcagaatgtactgaacaacctgaaagttgaaaaagcaatggttgttaccgataacgaaaacgtaatcgtatctgcaagaaacattccgaatgtgatcacagcatctgttggaacactgaatgtattcgatatcctgaaatacaacacagttgttctggacaaagcagctgttgcaaaagttgaggaggtatatgcataatggctaacattcaatattatgatgtaatccttaaaccggttgtaactgaaaaaagtatgaacgctatgagcgagaaaaaatatactttcctggttcatccggaagcaaacaaatctatgatcaaagaagctgttgaaaaaatgttcgaaggaacagaagtaaaaactgtaaacacaatgaaccttgacggtaagaaaaaacgtcgtggttacacagttggaagaacagctaagacaaaaaaagcaatcgttactctgacagagaacagcaaagacatcgaaatcttcgaaggtctgtaagattgcaaagcggacaaagtcaataagacttgagcgaacatccgatcgctcttactatcgctgaatgaaaggagataattacaatgggaatcagaaaatacagcccatatacaccgtccagaagaaatatgaccagcctggattttgctgaaatcacaaaatccacaccagagaaatctctggtagtatctctgaaaaagaattccggacgtaacaatcagggtaaaattacagttagacatcgcggaggcggaagcagaagaaaatacagaatcatcgacttcaagagaagaaaagatgatatccctgcaactgtagttgctatcgaatacgatccgaacagaacagcaaatatcgcactgatctgctacgcagacggtgagaaagcatacatcctggcaccagaaggactgaaagtcggcgctaaagttatgaacggagctaacgcagaagttagacctggtaactgcatgccactgtcagaaatcccggttggtactatggtgcacaatgtagaacttcatcctggaaagggcggacagctggttcgttctgctggtaatggagctcagctgatggcaaaagaaggaaaatacgcaaccttaagactgccttcaggcgaaatgagaatggttccgatcaactgccgtgcatctatcggtgttgtaggaaacggagagcacaacctggtaaatatcggtaaagccggaagaaaacgtcacatgggtatccgcccgactgtacgtggttccgttatgaacccgaatgaccatccgcatggtggtggtgaaggaaagaccggtatcggccgtcctggtccatgtactccatggggtaaacctgctctgggcctgaagaccagaaagaaaaacaaacagtccaataagtatatcgtaagaagaagagacggtaaaacattagcgaaataaggaggttacgtaaatggctcgttcattgaaaaaaggaccttttgcagatcagagcttacttaaaaaagttgatgctatgaatgcagcaggagataaatcagttattaaaacctggtcacgtcgttccacaatcttcccatctttcgtaggacacacaatcgctgtccatgatggaagaaaacatgtgccggtatatgttacagaagatatggttggacataaactgggtgagttcgttgctacaagaacttacagaggacatggaaaagacgagaaaaaatcaggtgttcgtaaataaagcggtatagcccaatcttgaaaggaggattttagtcatggcaaaaggacatagaagccagattaaaagagcaagaaatgctaataaagataccagaccatctgctaagttatcctatgcaagaatgtccgtacagaaagcttgttatgtactggatgtaattcgtggaaaagatgtgcagacagcactgggaattctgacatacaacccacgttacgcttcaagcgtaatcaaaaaattactggagtctgcaatcgcaaatgctgagaacaacaacggcatgagccttgaaaatctgtacgttgcagagtgctacgcaaacaaagcacctacaatgaagagaatcagaccgagagcacagggtagagcatacagaattgagaaaagaacaagtcatatctctatcgtgttagatgaaagataataaggagggtaatcatgggacagaaagttaacccacacggccttagagtcggtgttatcaaagactgggattccaaatggtatgcagaaaaagactttgctgataacctggtggaagactataacatcagaacattcctgaaaaagaaactgtacagcgcaggtgttgctaagatcgaaatcgaaagagcttccgagcgtgtaaaagttattatttatacagctaaaccgggtgttgtaatcggtaaaggtggttctgaaattgagaaagtaaaaaaagaactgcagaaatatacaacaaagaaactgattgttgatattaaagaagttaagagaccagacaaagatgctcagctggtagcagaaaacatcgcactgcagctggaaaaccgtatttccttccgtcgtgctatgaaatctacaatgcagagaacaatgaaagccggagcaaaaggaatcaaaacatccgtatccggacgtcttggtggagcagatatggctcgtacagagttctacagcgaaggaactattccgcttcagacactgagagcagatattgactatggcttcgcagaagctgatacaacttacggaaaagttggtgtaaaagcttgggtttataatggcgaagttcttccaaccaaaggaactaaggaagggagcgataaataattatgttaatgcctaagagagttaaacgtcgtaaacaattccgcggatccatgagaggaaaagcattaagaggaaataaaatcaactacggtgagttcggtcttgtagcaatggatccttgctggatcaaatccaaccagatcgaggcagcccgtgttgccatgactcgttatatcaaacgtggtggtaaagtttggatcaaaattttcccggacaaaccagtaacagcaaaaccagcagaaacacgtatgggttccggtaaaggtgctctggaatactgggtagcagttgttaagccaggtcgtgtaatgttcgagatcgcaggtgtacctgaagaaacagctcgtgaagcattacgtcttgcaatgcataagttaccatgtaaatgtaaaatcgtttctcgtgcagacttagaaggcggtgataacagtgaaaattaaaaattatgtagaagatttaaaagcgaaatcagctacagaattacaggaagaattagtagctgctaagaaggaactctttaacctgagattccagaatgcaaccaatcagctggacaatacaagcagaatcaaagaggttcgtagaaatattgccagaattcagaccgtaatcgctgaaaaggcgaacgtacagtaatctaagaaggaggcactaaatcgtggaaagaaatcttagaaaaacacgtattggtaaagtagtcagcaacaagatggataaaacaatcgtagttgctatcgaagaccatgttaaacatcctctttacaaaaaaatcgtaaagagaacatataaactgaaagcacatgatgagcagaatcagtgcagcatcggtgataccgttaaagttatggaaaccagaccgctgtccaaagacaaaagatggagactggttgaaatcgttgagaaagtaaaataatcgttatcagttaattcgtataggaggaataccagcatgattcagcaggaaagtagacttagagttgctgataacacaggtgcaaaagagattctgtgtatccgtgttatgggcggttctactagaagatatgccaatatcggtgatgttatcgttgcttccgtcaaagatgcaacaccaggcggcgttgttaaaaaaggcgatgtagttaaggccgttgttgtacgtactgtaaaaggtgttcgtcgtaaagatggttcttacatcaaatttgatgagaatgcagctgtcatcatcaaagatgacaaaacaccaaggggaactcgtatctttggaccagtagcaagagagcttcgtgagaaacagtttatgaaaattgtatccctggctccagaagtattataaggaggtaacctgatggcaagtttaaaaattaaaaaaggtgacaccgttaaggtaatcgtcggtaaagataaagataaagaaggaaaagttctgtctgtaaaagacggtaaagtcatcgttgaaggtatcaacatgatcacaaaacatgcaaaaccttctatggctaaccagcagggaggaatcatcaacaaagaagctccgatcgatgcatctaacgtaatgctgatccacaacggaaaagctgttcgtgtaggcttcaaagttgaagatggaaaaaaagttcgtgttgcaaaaggcagcaacgaagtaatcgactaattgagagaggaggcaattgaaagtgagcagactgaaagatacttacaaaaatgagatcgtagatgctatgaccaagaaatttggttataaaaatatcatggaagtgccaaaactcgataagatcgtaatcaacatgggtgttggcgaagccaaagaaaatgctaaaattctggaagcagctgtaaaagatctggaaacaatttccggacagaaagcagttctgacaagagcaaaaaattccgtagctaacttcaaaatccgtgaaggtatgccaatcggttgtaaagttaccctgagaggggaaaaaatgtatgagttcgctgatcgtctgatcaacctggctctgcctcgtgtacgtgacttccgtggagttaatccaaacgcatttgacggaagaggaaactatgcactgggtattaaagaacagctgattttcccggaaatcgagtatgataaagttgataaagtaagaggtatggacatcatcttcgttacaacagctaagactgatgaagaagctcgtgaattattgacattattcaacatgccgttttcaaagtaagaataggagggaaaattcatggctaagacagcaatgaaaatcaaacagcagcgtaaacagaaattctccacaagagaatacaatcgttgcagaatctgtggtcgtccacatgcttacttaagaaaatacggaatctgcagaatttgcttccgtgaattagcatacaaaggacagatcccgggtgttaagaaagcaagctggtaagagttgaaagcggatcgaaagatccgatgaaagcccacatcacttggcaaggccgaaaggctgcgctaaagtgagagggtattacacatacaaacaagaacatgaaaagtctaaataattaggaggaaactatcatgacaatgagcgatccgattgcagatatgcttacaagaatccgtaacgctaacacagcaaaacatgctactgtagacgttccggcatccaaaatcaaagttgctatcgcagacattctggttaaagaaggttacgtggcaaaatatgaaatcgtagaagatggaaacttcaaaaacatccgtattactctgaaatacggtgctgacaaaaacgaaaagatcatcactggtctgaagagaatttccaaaccaggtcttcgtatttacgctggtaaagacgaactgccaagagtactgggcggactgggaatcgcaattctgtctacaaaccagggtgttattactgataaagaagccagaaagctgcaggttggcggcgaagttctggcattcgtttggtaagatcgatcacttcgcgcaagcaaaggatatagaaactgaaaacagaggggactgagcgtcctctccgaaaatctaagttaataggaggaaaatggtatgtcacgtattggaagactgcctgtagttgttccggctggtgtaacagttgaagttaaagagaacaattacgttgttgtaaaaggttctaaaggaactctggaaagaaatctgcctgtagaaatggacatcaaagtagaagatggacatgtggtagtaacaagaccaaacgacttaaagaaaatgaaagctctgcacggtctgaccagaactctgatccacaacatggttgttggtgtcagcgaaggatatgaaaaagttctggaagtaaacggtgtaggttacagagctcagaaacagggtaagaaattagttctttccttaggatattctcacccagttgaaatggaagatccggaaggattggaaacaactgtagatggcaacaagattactgtaaaaggtatcagcaaagaaaaagttggccagtacgcagctgaaatcagagaaaagagaagaccggaaccttacaaaggtaaaggtatcaaatatgctgatgaagttatcagacgtaaagttggtaaaactggtaagaaataaataaggagagtgcaaaaatgattaataaagtatcaagagcgagtgttcgtactaaaaagcatagaagaatgcgtcatcatatcgttggtacagctcagagacctcgtctggctgtattcagaagtaataaccatatgtatgcacagatcattgatgataccgttggaaaaacattagtatccgcttctactcttcagaaagacgtaaaagcagaactggaacagaccaacacagtagcagcagcagcttacctgggaactgttatcggtaagaaagcagttgaggcaggaatcgaagaagttgtatttgacagaggcggtttcgtataccatggtaaagtaaaagcattagcagatgcagctagagaagctggcctgaaattctaggaaagagaggagcgaaatacatgagacatacaatcattgatgctagtcagttagaattagaagaaaaagtagtctcaatcaaacgtgtaacaaaagttgttaaaggtggacgtaccatgcgttttacagctttagtagttgttggagacggcaacggacatgttggtgcaggacttggaaaagcagctgaaattccggaagctatccgcaaaggaaaagaagatgctatcaaaaaattagtaaccgtagcaagagatgaaaacaacagtatcacacatgattatgttggtaaattcggcagcgctgaacttctgatgaagagagccccggaaggtactggtgtaatcgctggtggtccggctcgtgcggttatcgagttagcaggtatcaaaaacatccgtacaaaatgtatgggttccagaaataaacagaacgttgtacttgctaccatcgcaggtttaagtcagttaaagactccggaagaagtagctagacttcgcggtaaatccgtagaagagatctttgcttaaggaggactggaaaatgttaaaaattactttagtaaaatctacaatcggtgcagttccaaaacacaaaaaaacaattgaagctctgggactgtccaaaatgcacaaaactgttgaactgccggacaatgcagcaacaagaggtatgatcaaacaggttcagcatttagtaaaagttgaagaagcgtaattagaatagaaggaggtgccacaatggatttatctaatttaagacctgcagaaggttccagacagagtgatgacttccgtagaggccgcggacacggttcaggaaatggtaaaacagctggtaaaggacataaaggacagaaagctcgttccggagctccaagaccaggtttcgaaggtggtcagatgcctttatacagaagacttcctaagagaggtttcaagaacagaaataccaaagaaatcgttggtatcaatgtagaagctctgaacagatttgaagatggagcagaagttactatcgcagctctggttgagagtggtctggtttccaatccgaaggatggtgttaagattcttggtaacggagaactgacaaagaaactgactgtaaaagttactgcagtaagcgaaggcgcaaaagcaaaaattgaagcagcaggtggaacagtagcataagaggtgagcttatatgttaaagactcttcagaatgcatttaaagtgaaagatgtcagacatagaatcttttatgtgttaatgatgctggtagtcatccgaattggctcccagctccctgttccgggagtcgatggaagttatttcaaaacctggtttgaaagtcagacgggcgatgcatttaacttcctcgacgcatttacaggcggttcattttcacagatgtctatctttgcacttagcattacaccttacatcacatcatccattattatccagcttcttacaatcgcgattccaaaactggaagaaatgcagagagacggagaagatggcagaaagaaacttggtgcaattacccgttatgtaaccatcggattatccctgtttgaatctattgccatggcaatcggattcggtaataaaggattgattccggacaatagttttgttaaaatggttgtagtagttgttgcattaacagcaggttcggcgttcttaatgtgggttggtgaacagatcaacgaaaaaggtgttggaaatggtatttccatcgtacttttgatcaatatcgtatctcgtatcccgagtgatatgacgaaactgtacgaaagcttcatgaaaggaaaaattattgcaaaagcactcctctccggcgttattatagcggcgattattgttggggttgtaattctggtaattatcctgaacggagctgagagaagaattcctgttcagtattccaaaaagatgcagggcagaaaaatgatgggcggacagtccagccatattcctttaaaagtaaatacggccggcgtaatcccggtaatctttgcatcatctattatgtctttcccaagtgtgattgcttctttcctgggcaaaaccggtggaacaggtatcggtggcaagattctggcaggtatgaacagcaataactggtttgacctggaacatccatggtattcgattggcctggtggcttatatcgttatggtaatctttttcgcttacttctatacatcaattactttcaatccattggaagtagctgataacatgaaaaagcagggtggttttatccagggtatccgtccaggaaaaccaaccgtagattatctgacaaagatgttgaattatatcatctttattggtgcagcagggcttaccattgtagcggttatcccgttcttctttaatggtgtattcggtgcgaatgtgtcctttggcggaacttctatcattattattgtaggagttatccttgagacactgaagcagattgaatccatgatgctggtaagaaactacaaaggttttttagataactaaaaggttgtggcgttttacgccacagccttaaagtgctattatagtaattatttaattacgaaaaaaagaaggagagggtacaaagatgaaagtaattatgttgggtgcacctggtgccggtaaaggcacacaggcaaaaaaaattgcggaaaaatatgagattccgcacatctccacaggagatattttccgggcgaatatcaaaaacggtacagaacttggaaataaagcaaaaagttatatggatcagggacatctggttcctgatgagctgacctgtgatctggtcgttgatcgaatcaaacaggcagactgtaaaaacggttatgtattggatggttttccaagaaccattccgcaggcggaggctttaaaagctgcgctggagaaaatgggtgaaactattgattatgcaatcaacgttgaagttccggatgagaacatcgtaaaccgaatgggtggacgccgtgcctgccctggatgcggatgcacttaccacatcaaacacaatcctccgaaagtggaagatatctgtgatgtatgtggtgcaaaactggtgctgcgtgacgatgacaaacccgagactgttacgaaacgtctgagtgtatatcatgaacaaaccaagcctttgatcgacttctacaaaaaagaaggcgtattaagagaagtcgacggaacacaggatctgaatgatgtgttccaggctatcactgaaatcttaggagcgtaaaacatgtcagtatcaataaagactgccagggaaattgaattaatgagggaatcctgccatttgcttgagaaagttcatgacgaacttgcaaaagcaatcagaccggggatttcaacctgggaaatcgatcatttgggtgaagaaatgatccgaagtttcggatgcaccccgaatttccttcattacaatggatatcctgcatccatctgtgtatctgtaaatgatgaggttgtacatggaatcccgagtaagaagagaattctgcgagaaggagacattgtcagcctggatgccggactcatctacaaaggttatcattcggatgctgcccgtacccatgcagttggggagatcagccctgaagctcagaaactgattgatgtaacccgtcagagtttctttgaaggaatcaaaatggcaaaagcaggaaatcatctgtatgatatttccgctgcaatcggcaattatgcagaaagttttggatacggtgtggtcagagatctggttggtcatggaatcggaaccagccttcatgaagatccgcagatcccgaactttgcacagaagcggagaggaatccgtctggtgcctggtatgacacttgctattgaacctatgatcaccatgggcagaccggaagtctgctggctggatgatgactggacggttgtgacagaagatgaatcactggccgctcactatgagaatacgattctcatcactgagggcgaacctgaaatcctgacctttacgaaatagaggtgcccggatggaaggatatggtgttggcatgatggccagatcccttgccggtcatgataagggaaaggtctatatggttctggatgtgaaagagccttttgtgtatctggtggacgggaagatccgtacactggatcatccgaaaaagaaaaggatcaaacatgttcaggtggatcggcatattccggaatggatccagaatgtgatccgggaaggaagagatcttcaggattcggatgtcatccgtggaagaagagaatacggcgaaaagtaaaacaggagggaatgcaatgtctaaggcagatgttattgaagtagaaggcactgtccttgaaaaattgccaaatgcaatgttcaaggttgagctggaaaataaacatgtggtattggcacatatcagtggtaagctgagaatgaattttattcgtatcttaccgggagataaggttactatggaactttctccttatgatttgtctaagggtagaattatctggagagataaataagagagcgagtttatctcaaagggggacgcaccagccggatactttcctccgtcagcaacgtgggcagggtaactttgagctagccaccaactacgactaagactctcgcgagagcgctcgagcctaagtctgcgtaggtgtcggatctcaaagcttaccctaggcgcccacaaagtgttgctgacggaggaaagtatccggctggtgctggtttgagataaatgtgaagaggagaagaagaaagtacttcggacggggggggatccgtctggtaccggttttgggatagagtgaggaaagaaaaagtaaatatggaagtgacgggaatgcacgagaaaagatcgttgtatgcagaagcgtcgaaagactgaaaaatcagggaaaaaattgaaaaaatggcttgcatttttttagagacaatgctatactgtaagacgaacttttgtgaatgcgttctttttttgtgcgcaaaaaacagggttcttccaccatgagcaggcgcaagaatgcgtcttagctaagaaggagaaaggaggattcacatgaaagtaagatcatctgttaaaccgatctgcgagaaatgcaagatcatcaaaagaaaaggtagtatcagagtaatctgcgagaatccaaaacacaaacagagacagggctaatccgtcaattagatctgactgtttggaagcgagagcttcaaaattaagtgcggctgcagtaggacacatctggatgtgttgtactgtttagatattataatgagagtgctccggagtggtgtaccggagagcctccggcggatgaacgccgtagagagcgttgcatcccttataatattgcttaataccggctaagccggaaaggtcatggagacatggctggatgcttcacataccggcatcccaattaggaaaatattaatatgaccggataggacacacatttcagacatatggtgacatatgggctgccccgactggtcaagtagaagatggaggaaaattacatggcacgtattgctggtgtagacttaccaagagaaaaacgtattgaaatcggattaacttatatctacggaatcggtagaacaagcgctaaccgtattctggaagcagctaatgtagatccgaacacccgtgttagagatatcacggacgaagaagtaaaaagaatcagtgctgtaatcgatgagactcagactgtagaaggtgatctgagaagagagatcgctatgaacatcaaacgtctgcaggagatcggatgctacagaggtatccgtcacagaaagagcctgcctgttcgtggtcagaaaacaaagaccaacgcaagaacaagaaaaggtcctaagagaactgtagcaaacaagaagaaataattcgtggcaaccagtaacatagaatagaagaaagtgtaggttagtttttaaaatggctaaagtgacaaagaaaacgacaaaacgtcgtgtaaagaaaaacgttgaacgcggacaggcacatatccagtcatctttcaataacacaatcgttactctgacagatgctgaaggaaatgctttatcatgggcaagtgccggtggtctgggatttagaggttcaagaaaatctactccttatgcagctcaggtagcagcagaaacagctactaaagcagcgttaattcatggtctgaaaactgttgatgtattcgtaaaaggaccgggatcaggaagagaagcagcaatccgtgctctttccgcatgcggacttgatgtagtaagtatcaaagacgtaactccggtaccacacaatggttgccgtccaccaaaacgtagaagagtctaattaggaggtcagtagattatggcagtaaatagagtaccagttctgaaaagatgtagatccctgggtctggatcctatctatttaggaattgacaaaaaatccacaagacagttaaaaagagcaaaccgtaaagtgtctgagtacggtctgcagctgagagaaaaacagaaagcaaaattcatctatggtgttctggaaaaacctttccgtaactactacaagaaagctgaccagatgcctggtatgacaggtagcaacctgatggctatgctggaaatgagactggacaacgtaatcttccgtttgggattcgcaagaaccagaagagaagctcgtcagatcgttgaccacaaacatgtactggtaaacggcaaacaggtaaacattccgtcttacctggtaaaagccggagatcagattgagatcaaagaagctaaaaaatcttctcagagatataaagacattctggaagtgaccggtggaagactggttccggaatggctggatgttgatcaggaagcattaaaaggaactgttaaagaagttcctgcaagagatgcaattgacgtacctgtaaacgaaatgcttatcgtcgagttgtattctaaataattgtgagttgtggctcaccgtttacgtgtgggccatttcccatatgttaccctcagtgaaaataattatcccaataaggagggcctggtatgtttgattttaacaaaccaaaaattgagattacagaaatttccgatgataaaaaatatggccgctttgtagtagaaccgttggagcgtggctatggtattactctgggtaactccctgagaagaatcatgttgtcctctctgccgggtgctgcagtcagccaggtaaaaatcgaaggcgttctgcatgagttcagttccatcccgggtgtaaaagaggatgtaaccgaaatcatcatgaacctgaagagccttgcgatcaagaacacaagcgaaagcaatgatccgaagatcgcatacatcgagttcgaaggcgaaggcgtggtaagagcatctgatatccaggttgaccaggatatcgagatcatgaatccaaaccaggtaatcgctacattaaacggcggaccagacagcaagctgtatatggaactgaccattacaaaaggtcgtggttacgtcagtgcagataaaggaaaaacagatgatatgccgatcggcgtattagctgtagatgcaatctatacaccggtagagcgtgtaaacctgacagttcagaacactcgtgtcggtcagatcactgactacgataaactgacactggatgtttatacaaagggaactctggatccggatgaagcagtcagcctggctgcgaaagtattgagcgagcatctgaaactgttcattgacctctccgaaaatgcaaagactgcagaagtcatgattgaaaaagaggacaatgaaaaagagaaagttctggaaatgaacatcgacgagctggagctgtccgttcgttcctacaactgtctgaagagagccggtatcaataccgttgaagaactttgcaacagaacttctgaagatatgatgaaagtccgtaacctgggacgtaaatctctggaagaagtacttgcaaaattaaaagaactgggattgcagttaaatcctggtgaagaataagaagcagcttatgtactgcaactgccggtaactggccggtagggtaaaggaatatttgtagaagataaagcagtccgtcagtaagaccaaagaagcatggccggctgttccacaaatggaggaaaataaaatggcaggatatagaaaactgagcagaacatctgcacagagaaaagcgttaatcagaaaccaggtaacaaatctgttatatcatggtaaaatcgttactacagaagcaaaagcaaaagaaatccgcaaagttgctgaaggcctgatcgctctggctgtaaaagaaaaagacaactttgaaacagtaactgttacagctaaagttgctcgtaaagatgctgatggcaaaagagtaaaagaagttgtagacggaaagaaagtaactgtttacgatgaagtacagaaagagatcaagaaagacgctccttccagactgcatgcaagacgtcagatgatgaaagtattctatccggtaaaagctgttccgacagaagctgctggaagaaagaaaaacacaaaagacgttgacatggcagacaaaatgttcaacgaaatcgcaccaaaatatgctgaccgtaacggtggttacacaagaatcatcaaaatcggaccgcgtaaaggtgacgcagctatggaagtagttctggagctggtataatttcagagtgttcaaacgataattaacaggacaccgatctgtggaaacatagatcggtgtctttttttgctgcgttgcatagactgtttacgctctgtccagtattttttgcatctttttacatataaaaatcaacaaattaccatataaaattatcaggataacaggtatgatagagacatcaaagattctgaaaatgcatcccggacaactgagattttataaaaatatattatatcagcgaagtaatggatgaatgacagaagaaatatcggattaaaagaaaggatggataacaaaatgaacaaaccaatcgcactgacccctccgatgggttggaattcctggaatacctttacctgggatatcaatgaaaaaatgatctgtgagatggcagatcgcatggtagaagacggatatctggaggccggatacgaatatctggtcatcgatgactgctggagcctgaaacagcgtgatgcggacggtaatctcgttccggatccggaaaaattcccgcatggaatgaagtgggtcagtgattatgtacatggaaaaggactcaaatttggcatgtattcctgtgcaggaacccatacctgcgccggttatccgggcagttttgaacatgaattccaggatgcgaagaaatttgcagagtggggcgtggattatctgaaatacgactactgcttcaagccacggcagattccgggtgaaatcctgtataagcgcatgagccttgctttaaagaactgtggcagagaaatcctgtttgctgcatgtaactggggaactgacggagtctacgactggatccggtcttccggagcgcatacctatcgttctaccggggatattcaggataactgggaatccattacaaatctggcgatctctcagatgggaaaagagccctataccggcaatttctgccacaacgatatggacatgctggttgtaggaatgcacggtgccagcaatgacggatttatcggaagtaagatcggtggctgtaccgatcaggaatatctgacacattttgccctgtgggcgatcatgggatccccgctgatcatgggctgtgatctgcgaaaagcatccgaagagacaaagaaaaccctgttaaacaaagatctgattgctatcaatcaggacctggaagcacgcggggcttatgtgatcaaaccacttccggatgcttataacgagaatgaagcatttattctggtaaaacctctggcagatggagatcttgcgatcggtatctttaatttcagtgatacacagagggaactgtctctggaattctgggatatgggtattccatatgctgccggagtctccctgtctctgcacgactgcatcacaggggaagaactgggcgaatttaccgagcgatttgcaccggttgtaccatcccatggctgtgtggttgtgcgcgcgcgcattgtagaaaagtagaagaacagtgctgaataattaggaaaataaagagaaagttgtggaaaagtaaatggattgcagaaaatgcggtgcacatctcaccacagatgagaaagccatctatatgaaactggtatcgcgaaatgcttcgagttttctgtgcatggactgtctggcggaagcgttacactgcgaacgaaaagcgattgaagagcgcatccgatattatcgggaatctggcaattgtgtgctgtttcgataaacaaagcccctctttaccgtgaaaagtataattccggtgaagagggcttttgtgttttcgcgagcaacgagccaaaattcatgcttgcatgagacctttgcgactgacacgatatcaagtagaattcgtgaagtgtattttatctcgtttatgcaggtaagaagcaaagttttactatggggcagtccgatattgtgtttgttgacagtaattcaacaactgttttataatgcagacagaaaagatcggaaaaaggagacggcatggaacggataaagatagagcagttatttgaaaattattctttctggagacatctttcggaggaggaaaagaagatgcttcagaaacagattcgatggtgtacctacgaagaagggcagatggtcacggacacaggaagagactgtctggggatttttctggtatgtgatggtatcctgcgtgccaatctggtatcggaagccggaaaagaagctactgtatgccggatacatccgggagaactctgtgtgatttcggcgtcctgcctgcttccggcccttccttttgatattcagatcgatgctgagacggccagtgaagtatatctgcttccgacgggtatcctgcgacagatcatggaaaagaatatctatctggagaactttatctataaaaagatcaatgagagtttttctgatattatcgccgcgatacagaaaattctgtttgccagtctggagcagcgtctggtcggatttcttctggatgaggcggccggagaaaaagacggaaagatttatatgacgcaggagcagattgcaagagctattggaagtgccagagaagcagttagcagaacactgaaaggtctggtaaaaggtggctgtgtggagttgttccgcggtggtgtccgtgtggtcgatcggaaagaattatataaaaaaatataagaagaaaatatgcgcgattttttgcaaaaaagtgatcgagcaacagggaagagagattgtgtcagaacagggaaaagaagaggtcaatctggtgtgctatcatgtgtatgaaccgggcgatcagattcttctggaggctgtaacagcagaaaatcccccggtatcggacgacattccgcttaccgggggatttttctgtagtgatctgtttatttctccagcagtttcagaatattttccttactgtccacgccgacgctggtagctgtcagctcgccgtttttaaataccagaacggtaggaatgctcatcacgcggtactttcttgccagatccgggttttcgtctacgttgactttgcctactttgattttgccttcattttccgaagcaatctcttcgatcacgggggcaagcatacggcacggcatgcaccaggtagcccagaaatcaaccagcaccggcacatcggagccgagcacttctgcttcaaaattgtctgttgtaaatgtatattccatagtactatgacctcctgtgttttttatgataataggataccacatctgccgggaaagattctgtgattaagtcacaaacacaaatctgaagaaaatatgacggtattttcgtgaattttctgtaaaattttagaaatcaaactgattacaaaagacaaaaggcgtggtataatgagcccaaacgggcagacagggaaatgtctgtgaaaaagagggtttatcgtgggaaaattgtaagaaagaatgaagagatgaggtgtactatgaaaggaagaatgctgtttatcttcaatccgcgatccggaaaagggcagatccgcaacaaactgatggacatcatagatgtttttgtcaagggcggttatgaagtagtggtgcatccgacccagggggcgaaggatgcggaaaaaatggcaaagagcatggctgaagaggtcgatctgattgtgtgcagcggcggagacggaactcttgatgaagtggttaccggtctgatggaaatcggtgcgaatgtaccactcggttatattccggcgggaagtacaaacgattttgcaagcagcctcgagatcccgcgggatatggtgaaagcagcgcaggatatcgtggacggccatctgttttccgtggatgtgggaagctttaatgaagataattttatctatgtggcagctttcggcatgtttactgatgtttcgtatgaaacaagccaggatctgaaaaatattctgggacatcttgcctatgtgatggaaggcgcaaagagaatctttgatgtaaagacctaccatctgtgtgtggaagccaacggagaagtccatgagggcgattatatctatggaatgatcacaaattcccattccataggaggttttcgtaatctggtgggaaacgatgtggagatggatgacggtctgtttgaagttaccctgatcaaaaaaccgaaaaatccgctggaattaaatgagatcattgccgcattgatcaatgcgtacgatgacacggatatgatcgatgcatttaaggcgaacagcctgtatatccacggagatgaagcgatttcctggacacttgacggtgaattcggcggcgagcataaagaggtaagaataaaaaacagaaagcaggcgcttgatattctcatcaactcttgaatttcagaagttgatgggttataatatacaagaaataaaaacgtgaacgtaggaggtttgattatgttagtatcagctacagaaatgttaaaaaaagcaaaagcaggtcactatgcagtaggacagttcaacatcaacaaccttgagtggacaaaagcgattctgcagactgcacaggaatgtaattctccagtaatccttggtgtatccgaaggtgccggaaaatatatgacaggttataaaactgttgtaggaatggttaacggaatgctggaagagctgaatatcactgttccggttgctctgcatctggatcacggcagctatgaaggatgcctgaaatgtgtagaagcaggtttctcttctatcatgttcgacggttctcattatccaatcgaagagaacgttgcaaaaacaaaagaactggttaaaatcgtaaaagaacacggaatgtctctggaagcagaagttggttccatcggtggtgaagaagacggcgttatcggtgccggcgagtgtgcagatccgaaggaatgcaaaatgatcgcagatctgggtgttgatttcctggcagcaggtatcggtaacatccacggaaaatatccggcaaactggaaaggtctgagttttgaaactctggcagcagttcaggaactgacaggagaactgcctctggtactgcacggtggtacaggtatcccggctgatcagatcaaaaaagcaatcgacctgggcgtatccaaaatcaacgtaaatacagagtgccagctggcatttgctgatgctacacgtaaatacatcgaagctggaaaagacctggaaggtaaaggctttgacccaagaaaacttctggctccgggagcagaagcaatcaaagctactgtaaaagaaaaaatggaactgttcggttctgtaaacaaagcttgagaaatctaatcaaaattggtcggtcagaccagttttgatatacatggcaacaagtaggcagtctgcttatcaaaaaagtggactgccttttttgaagctagagcgtgtctgaaaaatcattttcgcaatctgcaagccccactttgcggtatattttaccctcattcggttgccgtagcccgctacgccgccatcattcggataaaatctcccacaaactgggactcgcagctcacgaaaagcctttttcagacacgctctggcagtcgataggccatggcggagaacatggcagcggaaaacatggagatggaaatcggggtaagacggaaaggataggaaaaatgagtgagtatgtaaacgtggttgagattttcggagaaaatgtatttaacgatgcggtcatgcaggcccgcctgcctaaaaaagtgtacaaagaactgaaacagacgatggaagagggaaaagaactgacgttggagattgctgatgtggtcgctcatgagatgaaagaatgggcgattgaaaaaggcgctacccattacagtcactggttccagcctctgacgggtgtaactgcagaaaagcacgatgcatttatcacagcaccgaaagcagacggaaaggtactgatgagcttttcaggaaaagagctgatcaagggtgaaccggatgcatcttctttcccatccggtggtctgcgtgcgacttttgaggcaagaggatatacagcatgggattgtacttcaccggcgtttgtgcgccaggatgctgcaggtgcaaccctctgcatcccaacagcattctgttcatatacaggagaagcactggatcagaaaactccactgcttcgctccatggaggccatcaacaaagaagcccttcgtctgatccgattgtttggcaatactacttccaaaaaagtgaccccatctgttggtgcggaacaggagtatttcctggtagatgcggcaaaatttatgaagagaaaagatctgatttataccggaagaacactgttcggcgcgatgcctccaaaaggtcaggagttggatgatcattacttcggaaccatccgtcagaagatcgccggttacatgaaagatgtcaacgaagagctgtggaaactgggtgtatcttcaaagacccagcacaatgaagttgcgccggcacagcacgaacttgctccgatctacgcaccggcaaacatcgccgtagaccacaaccagatcatcatgcagactctgaaacgtgtggcaagaagacacggtctcaaatgcatcctgcatgaaaaaccatttgcaggtgttaacggatccggaaaacacgataactggtctctggttaccgatgatggtatcaatctgttagagccgggaaaaacaccgcatgagaacgtacagttccttctggtactgagctgtatcctgaaagctgtagaccgtcatgcagatctgttgcgcgaatccgcatccgatgtcggtaacgatcaccgtctgggcgcaaacgaggctccgccggctatcatctccatctatctgggcgaacagctggaagatgtggtagaacagctggtaagcaccggtactgcagatcacagcttaaaaggcggccgtctgatgaccggtgtgcgtaccctgccggatctggcaaaagatgctaccgacagaaaccgcacctcaccatttgctttcaccggaaacaaatttgagttccgtatggtaggttcccaggattctgtggcagcaccgaatatcgttttgaataccatcgtggcagaagctttccaggaagcctgcgagattctggaaaatgcggaagatttcgatgtggcagttcatgatctgatcaagacaaactgcgcagaacatcagagaatcatcttcaacggaaacggatactccgatgcatgggtagaagaagcaaaacgccgtggtctgccaaacatccgctccatggtagatgccattccagcgctgaccacagagaaatccatcgccatgttcgaacacttccatgtatttacaaagacagaactggagtcccgtaccgaagtcaaatacgagacttacgcaaaagaaatcaacgtggaagcaagagccatgatcgacattgccgcaaaacagatcatccctgccgtgatcaaatacgcaaagcatctggctgatgccattatctccatccagaccatcccgggtatggacgtgagcgtggagaccgaacttctgaaagaaaccacaaaactcctgagagaaagccagacagccctcaagaccctccaggaaaaaacggaagctgcatccctgatcgaaaacaacgagcgccaggcaagatactaccacgatgaagtaaacaccgccatggaagctctgcgcaagccaatcgaccagctggaaatgatcgtagacaaagaaatgtggccaatgccatcctacggcgacctgatgttcgaagtctaaacaaaaaatcaaaccaattatataaaaataaatgcccgcaagtggaaaaatccccttccacttacgggcattcttacgttgccaagcatacgacaaaaaggtccggtggaccttttttagtagaacataaaatctgtcagtgtatgaaaatggcaacactatgaggagaggaaacaatcactccaaaatacgtaaatcagttactcatttaaatccataatattatggaaaaaacgtataacatacgacaacgccatccctcccagttgtcaatatccagccggaagaaagggagtctccaggggcagaggacactttgtgggcggttagggcaagctttgaaatccgacgcttacgcaggctttcgcgagggtcagctgaccctcgtgaactatagccgaagttagcggctagttcaaagttgccctgcccacgtcctccgcccctggagactccctttcttccggcgtccgcattacaactctcttcccccataaaaaggagggtgccagctacctccttccaaaggtacctggcacaattatgaaaaagtgttatcaaaagtaattcgcttgtatctttcttttgatttgttataatgtattatatgcaacagaaatgaaaaaataatgatgcaaaagtgaatgtattttgaaagaaaaatgaacaaattgtgaataaaggagaaaaaacaacgatggatgtacgaacatatctggaacaacagcaagttcatccccaattgatccgcgcagtagaagaattcagaaatcagtacccggtagaagaaaaagtaaaataccgggtaagcgatcctatgatgcctttctacggaaccgagattctggagatgggaattgccgcattgctgcagaaagaaaacctgttactttccggttccaaagccaccggaaaaaatgttctggcggaaaatctggcatggatcttccaaagacccacttataacatttccttccatgtcaacacaggaagcggtgatctgataggaacggatacctttgaagataatcaggtcaaactgcgaaaaggaagcatctatcaatgtgcggaatacggtggatttggcatactggatgaaatcaatatggcaaaaaacgatgcggtatctgtgctgcatgcaactctggactatcgaagaagtatcgatgtgccgggatatgacaagattgagctgcatcccgcggcacgttttatcggaacgatgaactacggctatgcggggaccaaggaactgaacgaagcgctggtatcccgttttctggtgattcagatgccggaccagaacgaagaaaccctggaaaaaatatttaccacttcattcccggagggaaaaccggaagccatcgaacagtttatcggactttttctggatctgcaaaaaaaggcggagaacggagaaatatccacaaaagctctggatcttcgaggaatccttgcttcgttgcgggcgatccgccagggactgaaaccgtctctggctgtgaggatgggtgtgatcaataagtgttttgacggatttgaaaaagagattgtagaagatgtggtcatgaccagaattccggaagaatggaccgcagcgcaggtgttttagatgaacagagaggaactggaagaaagacagttagagattgcaaacaggatgaaaaacatcatctggaccgtgtgcggcgattacacgcttgaggcgaagccggatgtggaagcctttttgaaatcaaaatatattgccctgtacgacgggatcaaacagggagcctttgcaaaatattttgaaaaagaaaagctcagtatgtatctggtaaaaaaagtctatctgggtgcccgtgaggatgcgctggtggcaatcgcgcagctgtgtatggaaaaagcggtgggagaccggatcgcccgagagcgaaaaggtgtgtcttcgattcagaagaaagcatatgaatatgtgctggatcacgagatggatacgatggtgaaatcagagttcgggcggctgcagctggcgatgatgcggcaggtactgaccggggaaagtcggtgtgaagagaagatccggaaacagctggaccggatcgaaccgctggagaaggcagctgatacgctggaagtgatccgcacgatcgacgactgctataatgcctgggtagatcctggattcgaacagatacacggtgatctgtccaaagtgcttgctgtcacagtggaagaactgatggaatacagctggcaggattttctgacagaagatatgtatgaagaaaactttgaagcctacctggaacagatgagccagcagatgactgctacaggacagaatcacgcagaagaaaaaaaagacgagaaagaaagttccaagaagagaaagatcgtccgggtatcagaagaagatctgaaaaaagtatatacgtatattgagctgaatttcgggaaaacctatctgtcgccgctggaagaaaaaaagattaattttcagttatgccgcggtatccatgcagactgtggactgtattttacgaatggaattctggccaatccggtgaagaaaaattatcagctggagtatgcaaaaaaacaacaggggaaaaataaatacgcttattatgacaatcaccggacggtaaaacagaatattgtgattctttccggaatcctgaaaaaagctatggccatgcgacaggaagagataacaatcctttccgacaggggaaagatctgcccggaaagactctggaagattgggcggagccgggatgccaaactgttttcccagatctgtccggcagacggaagcacctttgtggtggatgttttgatcgatgccagcggttcccagagggtgcggcaggaacaggtggcactgcaggcatatatcatcatgcaggctttgagcagcgtgcatatcccgcatcgtgtgatgagcttttgtaccttctgggatcatacgatcctgcagcgataccgggaatatgatgaagatgcatcggcaaatgaaaagatttttaattttaccacatcttccaataaccgggatgggctggccatccgggcagcttctctgggcctccttgaacgagaagaggagcgtaagattatgatcattctcagtgacggaagaccttacgatgtgattttaaaccgcccgaatgggagaaatccccagccgtatcagggaaaatatgcggtgcgggataccggaacagaggtacgacggttaagaaatctcggagtgtctgtactgggcgtgttcgcgggagaagagaaggatctggaggcagaaaaaaagatttttggtcgggactttgcctatattcgtgatatttccagattttcccacatcgttggtagctatttgaacaaacaaatagaagaaaattgttaatatttctcattgaatccgacagaggattttgttatagtaagttagtatgactctaagctgttgaagctttagtaacagtttggagactgaatatgaatcctcttcgttcggaggatgagacaagggagaaaagaaaaatggacaagaagaacgaaagcttcaagccttatatcagtgcggacaaagttcttccggaatttaccgtgacatcgatcctgatgggtattattctggcagtggtattcggcgcagcaaacgcatacctgggattaaaagtcggtatgactgtatctgcttccattccggcagcagttatttccctgggtgtgattcgtgtgatcatgaaaaagaactccattctggagagtaacatggtccagactatcggttcagccggtgagtcattagcggcaggtgcaatcttcaccatgccggcattattcctgtgggcagaggaaggaaaaatcgctatgcccggttacttggagattaccctgatcgccctgtttggtggtatcctgggtgttctgttcatgatcccgctgagaaaagcactgatcgtagaagaacacggtaccctgccgtatccggaaggaatggcatgtgcagaggttctgctggcaggtgaagagggaggttctaacgcttctaccgtatttgcaggtatgggacttggtgctgcattcaaatttatcgtagacggactgaaaattgttccgtccgatattgcaactccgaatatcaaaggatatgcaggccagatcggtgtggagatctatccggcactgatcggtgttggttacatctgtggaccatccatttcctcctatatgtttgccggcggtatcattgcatggctggttttgattccggcagttgttttcttcggcggaagcgtcgattttgccacactgggcaacactggtctggcaggtcagactatcgcagaagtttacgaagcaaacggagcaagtgctatctggtctaacgttattaaatacgtgggtgccggcgcgatcgctaccggtggtgtgatcagccttctgaaatctctgccactgatcataaaaacatttgccggagcaatgaagagtctgaaaaatacatccggcggaacaaatgtccgtactgaccgtgacctgaagatgccggttgttctcggaatcattctgatcgtgatcatcctgatctggctggtaccgtctgtaccggtaagccttctgggtgcattcctgatcgcaatctttggcttcttcttcgcaaccgtatcttccagaatggttggtctgatcggaagttccaacaacccggtttcaggtatggcgatcgcaactctgctgatttccacatttgtactgaaagctaccggtaacaccggtatggcaggcatgaccggtgctatcgcaatcggttctatcatctgtgtcatcgcagcaatcgcaggtgatacttctcaggacttaaagaccggatttatcgtaggtgcgactcctgcaaaacagcaggtaggtgagctgatcggtgttgttgcttccggttttgcaattgcaggcgttatgtctctgttaaacaaagcatggggctttggttccgcagagatccctgcaccacaggctactctgatgaaaatgatcgtggaaggtatcatggatgcaaaactcccgtgggtactggtattcatgggtgtattcctggctctggctctggaagtacttcgtgtaccggttatgccgtttgccatcggtctgtatctgccgatctacctgtcctgcggtattatggtaggtggtgtggttcgtctgttcctggataagaagaaacaagcagaagctaagaagaaagaaatgatcagcaacggtacgttgtactgtgctggtatgatcgccggcgaaggtctggttggtatcctgatggcagttcttgctatcattaaagtgggtgacaacagtatcggtgctatcatcggtggtctgttcaatctgtccggtgcggcaggaaacattgtcggactgatcgtgctggctctgatgatcctgagtctgctgaaattctctgtatggagtaagacaaaaagcaaataatgagagataaaagaaagtatctggattttgttcctgtaaagaatccacagcttccctggcaggaggatgaaggggcaatcgtcacggtggaagttactcaccgtggccttgccgccaaagtggcacagattgctttcaaccgcccgaaggtaagccatattcacatggatgcattcggaagttttatctggaaagaaattgacggagaacagaacatctatgagatcggacagaaagtgaaagaacatttcggcaaagaggcagaacctctttatgaacggctgacaacgtttttccgcattctggcagagaacaaatatatcacttataaaaaataactgaaattggttcactgaatcattactatgcaaaattatgaaaacctgtatttcgggtagaataaccgggaggacagagctttcagacagcgggcataatgtggtttagtggaccaattttggttttcaggatacttttttgaggtaaagaaaaggcgtggtgaagaaatgaagagtatgatcaaacaaaaaccatggatcagagattatctgctgatttttatcggtacggcacttatgtcgatcgcattgaaatccgcatttgataccaacgggatcgtagacggagggttcagcggcatcgcaattattgtaaaatcggtgacggaaccgctgcttccgggtggtattccgctgggggtgaccaacctgttgttgaatatccccatgtttttccttggtatcaaaattatgggcttcggctttatggcaaaaaccatctggggtacggtcagtctgtctttctggctgactgtgattccggtgattccactggtggagggggatatggtgcttgcggtattgatcggtggtgttatccagggaaccggtatcggtctggtatttttagggcgtggaaccaccggcggaacggatctggtggcatctctgatccaccggtatgtaaaacacatctcgattgcgcggatcatgcaggtgatcgacgggatgatagtggtgatcggagcttttgttttcggaccgaccaaagcaatgtatgccatcgtggcaatttatattgtgggaaaagtaaccgacggtcttcaggaaggactgaattatgcgaaagcagtatatattattacggatcatcaggaagaggtatcgagaagaattctcgaagatctggaccgtggggtgaccggcgtccatgcacagggtatgtatgccggcacagaacggctgatgcttttttccgttgtaggtaaaaaacagatcgtgcagctgaaagaagtggttgcacaggtggatccgaaagcattcatgatcgttacagatgccagggaggttctgggagaaggatttcaggaatataaggtgtgaacaaaatgtgaaaatctgctctgattgttactttttcatgtttttctctttattttttgtatattttatattagaatatgatttaagagactttgcttatcaggggtggatagcagattctaaataaactatgtactgaaagagggtatgattatgatttcaaatcagatactgcaaaacacactggatggtttgaaaaatatttccagaagtgatttctgtgtggccgatacagaggggaaaatcctggcattcacagcacagaatccggaaataagcagcagtgatattttaggatttgccgcgtctcctgcggacagtcaggtagtacaggaaaaccagtttttcaaagtatatgatgaaaatcggctggaatatgtactggttgtcagcgggggtagtgaagatacgtatatgatcggtcagatggcagcatttcagatccagaatctgttggtggcctacaaagagcgctttgataaagacaattttatcaaaaatctgttactggataacctgcttctggtggatatttataacagagcaaaaaaactgcacattgatgtggaaacaaaacgtgtggtgtttatcctggaaaccggtcagggaaaagattatacggctcttgaaaatgtaaaaaatatttttcaggggaaaaagggcgattttatcaccgctgtggatgagaagagtattatcgtggtgaaggaagtaaatcccggcgacggttatgcagagatgcaaaagatcgcagaatcgattctgcaggcggtacgcgagaaggatgaacttgtgcatattgcatacggaaccattgtaaaagaacttaaggaggtctcacgttcttacaaagaagcaaggatggccctggatgtcggaaagattttctttgatgaaaaagaaattattgcctacagttcactgggaatcggccggctgatctatcagcttcctattccgctgtgcaagatgtttataaaggagatcttcgagaataaatcgccggatgatttcgacgaggaaaccatcacgactatcaacaaattctttgagaacagtctgaatgtatctgagacatcacgtcagctgtacattcacagaaacacattggtatatcggctggataagctccagaagagcaccggtcttgatctgagagtgtttgaagatgcaatcaccttcaagatcgctcttatggttgtacgatatatgaagtatatggaaaccttagactattaaagaatagaaacaggaggagtatatgattacgttggaaaatgtaagcaaatcttacgccaagggccaaccggctttaaacgacgtatcgctgcacattgataaaggggaatttgtatttatagtaggaaacagcggttccgggaaatctacgctgatcaaattactgttgaaggaactggaacctacttccggaacaatcattgttaacgatcagaatctcggcaagatgaaacgcagaaaggttccgaaataccgtcgtggggtaggcgttgtatttcaggatttccggttgttgaaagatagaaatgtatatgagaatgtagcatttgcacagcgcgtgatcgagaggccgaaccgggtgatcaaaaagcgtgtgccggagattctcacactggtaggactggcagaaaagtacaaatcatttccgagagaattatccggtggtgaacagcagcgtgtggcactggcccgtgcactggtcaaccgtccgaatattcttctggcagatgaacctaccggtaatctggatccgaagaattcactggagattatgaaactgctcgaagagatcaacgagagaggaactacagttctggtagtaactcataacagagaaatcgtcaattcattcagaaagcgtgtaattaccatgagaaaaggtgtaattgtcagcgacgaagaggaaggtggatatcttgaggattagtacaatcggctacagtgccaaacagggaatcaaaaatatatggagaaatatcatgttctccgcggcttccatagccactatgacagcatgtatcttcttatttggtctgttcttttcgctgttgatcaactttcggtatattgtaaagaatgcagaggaaggcgttgcggttaccgttctttttgaggatggtgtggatcaggcgacgatcaacagtatcggggagcagatcaaggcgtataaaggcgtaacgaaggttgaatatgtatccgctgaagaggcatgggatgaatggtcaaaacagtattttggggatacagaactggcatctgagatggcagaaggatttaagaatgataatccgctggcgaattcttccagttattccgtctatgtggataagatcgagcatcaggatgcgctggtaaaatatatcgaggggcttgatggtgtccgggaagtgaatcagttaaagggcgcgacacagaccttgtcttcctttaacaccttattgacctacatatccgtggcaatcattctgatcctgctttgtgtggcggtcttcctgatcagtaatacggtagcgatcggtatttccattcgtaaagaagagataggtatcatgaaacttatcggtgcgaccaacttctttgtaagagcaccatttctgatcgaaggtatgatcatcggtctgatcggagccatcattccgctggtattactttttgtcatgtacaagaaagtgatcgaatatgttcttacaaagttcagtatgctgagcagtgtggtacagtttatgagtgttacacaggtattcgaagtactgactccggtggcgctgatccttggtatgggtatcggactgttcggaagtgtgatcacgatccgcaaacatctgagagtctgataaataacgaatgagaaatcaaaatgccatcaccgaaggtgattggaaataatacaaagggggatgcagcaggaaagcggcagccccctttgtatatgaatgagtttctgcaaaaactgagaaattgcaggagaagacagtaacagacaggagacaacagagatgacagaaagaatgaaaacctggatcaaaggatttgccgggggtgtggcagcaaccgtgattgtgggtggtatcggatactttatctgctttggatacgttccaatgatcggagaacagggtctgagcctcagtgatcttggtaaagcatccaaaatagcaaaattagtggatacatattatctggattacaaagaaggtgatgaagacagccagtatacgatggaagaaggtatgtacagtggactggtagccagtttgcaggatccttattccggctactattccaaagatgcctacaagctgctgcaggagtccacacagggggcgtatacaggtgtgggacttacgatgtccaaggatccggacagcggagttgtcagtgtggtggatctggcagaaggcggtccggcagagcaggcagggattcagaaaggagatatcctgacggcagtggatggaaaggatattactgaaaaagaactgtcagagatctccaaaatcatccgggaagataacaaaaagcaggttgttttgactgtggaacgggatggaacgactgccgatatcacagtatctctggaaaaggtggaagtaacggtagtaaagagccggatgcttgacgattcccttggatatattcagattacagaatttaccgatggcacttcggaacagtttaagaaagcctacagtgaactgaatgaacagggaatgaaaggacttctggttgatctgcgggaaaatccggggggacttctgacagcggtatgtgatacgctggaacagattcttccgaaaggtatgatcgtgtataccgaagataagagcggacatcggacggagcatacctgtaaaggaaaaacaccgatcgatattccgctggtggttctggtcaatgaaaacagtgccagtgctgcagagatcttttccggagcggtgaaagatcacggtgtgggaacgctggtgggcaccacgacatttgggaaaggaattgttcagcagactttttcactgggagatggcagtgcagtaaaactgaccacttccagatattataccccaaacggtgtgaatatccagggaaccggaatcactccggatgtggagagtgactggccggagaatgcagaagaatttaccaatccgaatcagtttaacgagctttctcaggaggaatgggagagtaaggatgcacagatgaaaaaagcaagagaggttctttcggaaaaggttgcacaggcagaacagtgatggtaaaatgaaaaaaaatgtatttcgggagctttccggtaatacataaaagtgcggggaggacagagtatggaaaaatatgtaattacgacagagaatacagcagatctgccttattcttactataaagaacatcaggtagaatatatgtatctgacataccagctggatggaatcacttataataaagaaaatgagctggattttaaagcgttttacagtcggatgcgagcaggatccatgccgaccacgtcccaggtcaacagtgaggaagcgaaagacgttctgcgaccgcttctggaggccggaaatgatgtactgcatctggcattttcttccgggctgagtggcagttataacagtgtacgtctggcagcagaagaactgaaagaagaatatccggacagaaagattttggtagtcgattcgctgtgtgcttctcttggagaaggcctgttcgtttacaaagcggtacagatgaaagaagcgggggcatctgtggatgaagtggctgcatggctggaagaacacaaacagaacttctgccatgtatttaccgtagatgatctgttccatctgtacagaggtggcagagtatcaaaagccgcagctatcgtgggaacaatgatcaatctgaaaccgctgcttcacgtggatgacgagggacatctgattccattaagtaaggtacggggaagaaagaaatctttggcgacgctggtctccatgatggaagagcgcatcggaagctggaaagataaaaatgatattatctttatcagtcatggtgactgtgaggaggatgcacagtatgtggcaaaactggtcagagaaaagttcggatatgaaagttttctgatcaatacgatcggggctacgatcggaacccattccggaccgggaacagtagcgctgttctttatgggagaatatcggtaggaaaaaggttacaaaagcaaaatataaaaagcaggaaaagaatgtgagataaatctacatttttttcttgctttttttcatataatatgatactgtcagattacaaggaatggaaacgttaccgataacgtttccgaaagtactggaaatctaaaggaggataaaaaatgagagcaagtggtatcttacttcctgtaacatccctgccgtctccgtatggtatcggctgtttttcaaaggaagcttatgagtttgtggaccagctggaaaaaggcggtgaaaagtactggcagattctgccgttgggaccgaccggatatggagattccccgtatcagtccttttccacctatgcgggtaatccgtattttattgatctggaaacactgatcgaggaaggactgctgacaaaagaagagtgtgacagtgtggattttggaagtaatccggcatatgtggattacgaaaaaatttatatgggcagatttgaacttctggagaaagcgttccacagatttgtaccggatcaggcatatgaaacctttgtggaaaaaaataaaaaatggctggaagattacagtctgtatatggcgatcaaaaacagcctgggcggaattgcctggagcgagtgggaggcaccgctgaagacaagacaggaagctgccctggaagaaaaacgagtggaattaaaagaacagatggattttatctgttttcagcagtatgaatttgcaaaacagtgggagaaactgaaacagtatgccaatgaaaaagatatccagatcatcggtgatattccgatctacgttgcatttgacagtgcagatgcatgggcgaatccggaactgttccagtttgacgagaacagtacaccgctggcagtggcaggatgcccgccggatgcttttgcagctaccggacagctctggggcaatccgctgtatcgctgggattaccacgcacagacaggatatgtctggtggatcagccgtctgagacattgctttacactgtatgatgtggttcgtgtggatcatttccgcggatttgatgagtattatgcgatcccgtacggtgacaagacagcagaaaacggtgtctggaaaaagggtccgggaattgatctgttccatacagtgaaaaaagaactgggcgatgcaaacatcattgcagaagacctgggatatctgacggaaagtgttatgaaactggtggaagatacaggatatccgggaatgaaagtattacagtttgcatttgattcaagagaggaaagtaactatctgccacataattatccgcataactgtgtggtttacaccggaactcacgataataatacggttcgtggatggctggacgatatgtgtgaggaagacaacgcactggcagaagattacatgaacaatgcggatacaccgaaagatgaacgtccgtgggagttcatccgtctggcactcggttccgtggctgaccttgcggtgattccgctgcaggattatctgtgtctgggaacagaggcaagaatcaatcttccgtccactcttggcaacaactggaagtggcgtctggtgccggggcaggtaacggacgagatgcttgaaaagatgtgtcatctgaacaagctgttcggaagattgtaaaagagagaggaagtggtcttgtggcaggcatgacaatcaaagatatcgcaaaaaaatgccatgttggcgtcagtaccgtgtccagggctatgaataatcatccggatatcaatccggaaaccaaggaaaaaatattaaaagccattgaggaagcaaactatgtgccgaataacagtgccagaaatctgaaacgaaatgatgcaaaggctatcgcggtgcttgtcaaaggtatcggcaatacctttttcagtgaactggtaggaattctggaacgggagtgcgaaaagaagggttacagctgtatcctgcaatatgtggacgaacaggaagatgagtgggacgtggcgattcgtgtgggaaaagaaaaaagactgcgtgggctggtgtttctgggaggaagtttttctcagagtcaggaaaagatcagtcagatggagattccctgcgtactcagtaccatctgtacagtggggatgccgggtgcatccctggcttccgtatcggtggatgattttaaggaaagctataagatgacggagtatctgatcgggctggggcataaaaaaattgcttttattacagccccgaaaaatgatgccagtatcggaaagctgcgtctgatgggataccggacagcactggagcagtatcagatcccttaccgggaagaactggtgtgttacatggatgaaaaaagggacacatactcttatcagtccggttaccggctgatgcaggagcttttgaaaagagaaacatttaccgccgtctatgcgacggcagatacactggcgatcggagcctgcagggcattgaaggaggcgggaatatctgttcccgaagagtgttctgtggcgggatttgacggtatggatgccggaagattttatattccgagtcttacaacgatccgtcagccggtggaagagatcgggaaggcaacggcaggacttttatttgatctgatcaaaggaaaagaaaagccacggcagctgatctatgaaggggagttaatacaaagggagtcaactgcccgatgtaaacagtaaattgaggagattatttagaggagaaaattattatggaaaaaagattgcaggaagtactggaaaaaagatttcataagacactggatacatgtacaaaagaagaactgtttcatgcactgatggagatcacgaaagaagcgaccggtaacctgaagagaaacgagggatcgaagaaactgtattacatctctgcagaattcctgatcggtaaattgttatctaataatctgatcaacctgggtctgtatgaggagacagaaaaagtcctgaaatctcatggatatgaactgtgtgagattgaggaactggaaatggagccttctcttggaaatggcggactgggacgtctggctgcctgcttcctggattctattgctacgcttggtcttccgggagatggtatcggactgaattatcattttggtctgtttcagcagaaattcaccaatcacaaacagcaggaattgaaaaatccgtggatcacaaaagaaagctggttaaacagacagtcttttacctgtaaagtaccatttaaagatttcacaatggacggtgttctgtacgatatcgatgtgccgggatatgattccggatgtaaccgcctgcatctgttcgatgtggatactattgatgaaagtatcgtaccggaaaacagtatcaattttaataagaaaaaagtacaggaaaatctgacgctctttctgtatccggatgattctgatgacgccggacgcaaactccgcatttatcagcagtactttatggtaagctgcggggcacagctgattttaaaagagatggaggatgcaggatatgatctgcatgaattaaataatcatgcagtgatccagatcaatgatacccatccttccatggtgattccggaactgatccgtctgctgaccgaagaaaaaggatttaccatggatgaggcagtggaagtggtaagtaagacctgtgcatataccaatcataccattcttgcggaagcactggaaaaatggccgatggaatacctggaagaagtggttccgaatcttgttccgatcatcaaggaactggatgaaagagtgcgaaaaacagtaaaagatgagtccacttacatcatcgatgcgcaggacagagtgcacatggcacacatggatattcattacggattttctgtcaatggcgtggcagcactccacacagagattctgaaaaactcagaactgaaaaatttctatgacctctatccggaacgttttaacaacaaaacaaacggaatcacgttccgtcgctggctgatgcattgtaatccgatactgaccagatatattgaatctctgatcggaaacggattcaagaaagatgccacagaactggaaaaactgctggcttttgaaaatgatgaaacagtgctgaacaagctggaagaaatcaagatggaaaagaaactggaattcaaagaatacatggaagaaacccagggactgactattgatgaacattccatcattgatgtacaggtaaaacgtcttcatgagtataaacgtcagcagatgaatgcactttatgcaatctacaaatatctggacatcaaagcgggcaacaaaccgtccacaccgatcacaatgatctttggagcaaaggcagcaccggcgtatgtgattgcaaaagatattattcatctgatcctgtgtctgcaggaactgattgagaaagatccggaggtaagaccgtatttccgcgtactgatgattgaaaattataatgtttccaaagcagcaaaggttattccggcagccaatatttccgaacagatttcgctggcatccaaagaagcatccggaaccggtaatatgaagttcatgttaaatggcgcgctgacgctgggaaccgaagatggagcaaatgtggagatccgggatctggttggcgaagagaatatttatattttcggcagaaaaccacaggatgtcatcgatctgtacgaggcaggtacttacagttccaaagaaatctatgaagaggatgcgcttatccacaaactggtagattttatcacaggagaagaactgcttgcgatcggtgatgaagaaagtctgacccgtctgcacagagaactgatcggaaaagactggtttatgacactgttggatacaaaagaatatatcacaataaaagaaaaggtctatgcagattatgaagatcgtaagacctggaataaaaaagcactgatcaacattgctaaagcgggattcttctcatctgacagaacgatcgcgcagtacaatgaggacatctggaaattaaaataatacgattcctgtaatcataaaagtaagaaatccgtccatactatagtaaaaaacagatctatggtatggagggattttttatgattggaatatggattgcaattctttcaggaacactgatgagtattcagggagtgtggaatacacaggtgacaaaacagtccagtctgtgggtatcgacaggatgggtgcagctgacggcgtttctggtctgtgtggcagcatggttttttacaggaagagattcggttggaacactgtggcaggttgaaaacaaatatacactgcttggaggaattctgggaacatttatcactgtgaccgtgatcaggagtatgggaaaactgggaccggcacaggcaacgatgctgattgtgatcgcacaactggtggtttcctatctgatcgagatgttcggacttttcggtgtggaaaaacagccttttgaatggaaaaaactggcaggtacggcaattgttgttgcaggaattgttctttttaagtgggagtgaattatttcgggtttacagtcttgtaattcagatgaaaattgggtaaaataaattgtgtatgcatggagggagccttagagcgaaagcgataaggagcgtgcagatgaaacagaaaaagaaaattctatggatgcttttgccggtgctgatatttgtcggttgtggtacgcaggacagcatattgaaacgaggccaaccggaaaccggttcgctggaagaacagcaggatacggaaacggtatacaacgtggagtcagagacgcaagatgaaaagccggaacaggaagagaaacctctgcaggaatggatctatgtggatgtatgcggtgcagtcaggaatccgggggtctatcggatcgaggccggaagccgggtgtttcaggtgttggaacaggcgggcggctgtacagagaaggcttcattagagacagtgaatcaggcagatcttttaacagatggtcagaagatccggatctataccaaggaggaagccgggcagatggaaaagaaactgcaggaagaagatccccttttggatgatcgggtagatatcaaccgggcaggaaaggaagagctgatgacactgaccggagttggagaaacaagggcacaggcgattcttgcatatcgtgagacacatggcagcttttccagtgtggaggagctgatgcaggtggaaggcatcaaagaaaaaacatatgaaaagctgaaagatcagatcaggatcaattgaggagtaaagaatggcgaagaaagtattggttgtagacgatgaaaaattaatcgtaaaaggaatccggttcagtctggagcaggacggtatggaagtagattgtgcctacgacggggagaaagccctggaatgtgcaaagaataaagaatatgatatgattctgctggatctgatgcttccgaagatgaatggacttgaggtatgccagcagattcgtgaattttcagatgttccgattattatgctgacagcaaagggcgaggatatggataagatccttggtctggagtatggagcggatgactatattaccaagccttttaatattctggaagtaaaagcaagaattaaagccattatgcgccgtgccggtaagaatgccacacaggagacaaaagcaaaagtggtagaggtcggagaattacgactggactgtgaaagccgtagagtctttatcggtaccagagagatcaatctgactgcgaaagaattcgatgtactggaacttctggtatttaatcccaataaagtgtacagccgtgaaaatctgttgaatatcgtatggggatatgaatatcccggagatgtgcggacggtggatgtacatatccgtcgattgcgtgaaaagatcgaaagcaatcccagcgaaccaaaatacgtacataccaaatggggtgtaggatattattttcaagcgtaagatccagaatgcaggtcaaacacagccggtatgtcaggcgtgtaaacctgcattctttgtttacgcgagcaacgagtcaaagtccgtataaaaaacagcagtgaggaacagtatgaaagtcaattggaaagtcagatttaagtttgtaaaaagtctgcgatttcgaattttagtgattctgatcattattggtattgtgccaagtatcattgtggaaaagggaatcgtaaacagttacgaggatcgggcggtatcaaaccgacagctgaatgtaaagaatcagtgtgatatcctggtgaatcagctggcaaaagagaattatctccaggatccgtcctcagagggaattaacagtgagctgacaatgctctctaatgtatatagtggccgtattctgattgtgaatcaggattttcagataatcaaggatacatatgatcttgacaaaggaaaatatatgatttccaaggaagtggtcaagtgctttcagaaattgaaagagagcagctattatgacaggaaaaacagttatattgagatgactatgccgattcccggtgcagatggagaacgggcacagggagttctgctgatcagtatttcaacggaagaaattgtctcaagtatcgatattcttgagcagaaaggactgcggattcttgtgatcagcggtgtcctggtgctgatcttcggatatattctggccggaatcctgataaagccgtttgcaaaaatcacaaaggctattgaggatatcacagatggattccaggatgagaaaatttcagttccggattatacggaaacagagctgatcacagatgcgtttaacaagatgcttggaagagtacaatctctggatacttcccgtcaggagtttgtatcgaatgtgtctcatgagctgaaaacaccattgacatccatgaaagtgctggcagattcactggttgggcaggaaaatgtgccggtggaactgtatcaggaatttatgcaggatatcgcagcggagattgaccgggaaagtaagatcatcacagatttgctgacgcttgtaaaactggataagaaagcttccaacatgaacattgaactggtcaatatcaatgaactcctggatatgatcctaaaacgtctgcatccgatcgctgcgaaacgaaatattgagctgattctggaaggcttccgtccggtggatgcggagattgacgagacaaaactgtcacttgccatcagcaatctggtggaaaatgcgatcaaatataataaggatgaaggctgggtaagagtatcactgaatgcagatcataagtatttttatgtgacggtaaccgattccggccttggaattccagaggaatccattgatcatatctttgaacgattttaccgggtagacaaatcgcattccacagagatcgaaggaaccggtcttggactggcgattacaagaagtgccatcatgatgcatcacggggcgatccgtgtgaagagtcaggtgggtgaaggaactacattttcagtgcggatcccgctgacgtttattgactgatcgaggatggtgagaatatgaaaaaaagaaaagtaacagcattggtgatggcactggtgcttgggtctgttgctttttccggctgtggaaagaaagagacagagagtaaatacaaaatttattatgtcaatgaagaacagggagaagtccttgcggaaggttttgtaccgtccgaggagacgacgcagaccatgctggaagagatgacagaaaaattgaataagaaaaatgcagaagggcatacactgctcccggagaatattgagatacaaagctgtgtggatgacgacgggatgattcgggtagattttaatcaggaatatcatgatttgaatccggtagatgaggtgcttttgcgagcttccatcgtaaaagattatgtacagattccaaatatttatctggttacgattactgcggaagggacacctatcgttgattcccaggggcaggagataggagccatgagtctggacagctttctggaaaacacaggaaaagaaattatggcatatcagtataaggaactcaacctttattttaccaatgaagaaggcaatcaactggtaccggaggcacgtcaggtatattataatggtaacacgccgattgaaaaggttatcgtagaacaattgcttcgtggtccgggagagagtggacattatgccacccttccgtccgatacacgaatcgtcggggtatctgtggcagatggaatcgcttatgtgaatcttggaaaacagtttgttgatgaggcactgccggtagatgcacagattccgatatactcgattgtcaattctctgattgatgcaggcaatgtaagtcaggtacagatttccattaacggagatacttctttgctatttaaagataaagtggatatgaatcaactgttccaggtcaatcatgaattggagaaaggaggagaggactgacgggaaaacgtcctctctgcctgctgtttgcaggactgatcctgattattctggtgacggactggtgtggaggttcctggatatggaaatctcccgccgggaagaaaccatggcagtgggcagaacaagagcagaaggtacaggcggaaggagtggtgtaccgtattgaaaaaaccacccgcacagttatttatctgaaaaaagcaattctgatccgttccggatcgacaaaaaattatcccattcgaaatatcaaatgtacaggaaaagaagaaaaaataaacagtctgcgggaaggaatgcatgtccgactggaggggatgcttgtattgccggaacttccgcgcaacccgggacaatttaaccgaagaatctacgaaagcgggaagaaaattgatttttatctggagaatccgactgttttggaagtaaaagaacagagatccggtgtcagggaagttgtggaaatatggaagacagaaatgatgaaccgatgtgagaaaatctatccggatgcggaggcaggcatactcgaggctatgttgtttggcgaaaagagggaactgtccggggatatcaaagaactttatcaggcagcgggaatcagccatgtgcttgtcatctccggtgttaagactttaaagttggatatcccactagtgcctgaaacccgcataaaatgggcatttatgccactacatatcgctaaaatttacattttaaaactgtgcttagacgaggaaattattcctcgttgtcgtttcccttgttcaagggggtatctcacaaaatgtataaatcagcaaaagaagcaataattcagcgtaagtttaatcttatggcagaagtctaaaaaatggcaaaaggagaagatgaatatggcatataaaaaatatagagaaatgaaggtttatgaagcaagagggtaccagtataagcagacaccgagtattgttttgaaaggaaaatggctttcagagttgggatttaacattggagaacagattgaggtgaaatgtgaggatggacggttaattataacgaaggcgaatgagatatggagtgctgaagcttaatagaggcttttactttttaaacactgttcattattatatcaaaaaataaaaatgaaaaagctataagacattaaagctagattgagttgataccaacccaatgaatagtattttccgttcaaaccaactagggcttcttttggttgatttccggcggtaatacgaatataatatttattaggtgaaagtattgcgatttcataggagaaaatgaatggaatatttaacagtgaaagaaattgctgaaaaatggggaatctcagaaaggcgccttcaaacgatgtgtaaagaaggaatggttgaggggagtaaaagatttgggagatcatgggcaattccagaggatgcggtaaagcctgttgatcgtagaataaaatctgggaaatatatgaaaggtaaaaaaaactagaaaaaatgacggaggtaaatataaatggcgaaaaatacagccgacataggatttgaaaaacagatatgggatgcagcctgtgtgcttcgtggtaacatggatgcgtcagaatataagaatgttgtactggggttgatttttctaaagtacatttcagatcgattcgatgacaagtatcaggagctgaaagatgagggcgacggatttgaggaggatattgatgaatatacttccgaaggcattttctttgtacctgtaggtgcacgttggaatgagattgcagcgaaggcacatacaccagaaatcggtacagttattgatgatgccatgcgtgctatcgaaaaggaaaataagcgtttgaaagatattcttcctaagaatttcgcacgtccagaactggataaacgaagattgggggatgtggtggatttattcactaatatccagatgattgaacacggcagcgaaaaagatattttgggacgtacatatgagtattgtctttccatgtttgcagaacaggaaggaaagcgtggtggtgaattctttactccgtcatgtgtagttcgtactctggtagaggtgctgaaaccatataaaggtcgagtatatgatccttgttgcggatcaggtggtatgttcgttcagtccgcaaagtttgtagaaaaccatagtggcaatatcagcaatatctctatttatggacaggactccaatccgactacatggaagatggcgcagatgaaccttgcgattcgtggaattgagccggatcttagcacttacgcagcagatacctttttagatgaccgtcatcctacattgcgtgcagactatattatggcaaatcccccatttaacctttctgactggggtgctgataaattaaaagaggatgtgcgttggcagtacggtatgccacccgcaggaaatgccaactttgcatggctacagcatatgattttccaccttgcaccagccggaagaataggtatggttcttgccaatggttctctttcttctcagtcaggcggtgagggcgagattcgcaagaatatcatcaatgccgacttggttgaatgcatcgtagcaatgccgactcagcttttttatacaacacagattccggtttcactctggtttattaataaacagaaaaaacagtctggaaagacactgttcattgatgctcggaagatgggggctatggttagccgcaaacttcgtgaacttactgatgatgacatcaagaagatttcagatacctatgaactgtttgtagacggaacgcttgaagatgtgaaaggtttctgtgctgttgctgatacagcagaaatcgaaaagcaagactatattctcactccaggtcgatatgttggcattgaggaacaggaagatgatggagaaccattcgaagaaaaaatggatcgtctgacatctgaactttcggagatgttcaaaaaatcaatagacctgcaagatgaaattaaacatcaattggcagccattgggtttgaaatataggaggtgcttatgaaaacaatagcacttcgattttcggataattttgcaccgactgatggaacgattgcggaacataaaaaaatgataaattcaaatggttatgtttggtacggaaagttaggctcgaaagtttccgacaaagtatgtaaacaaattctggaaaacgaagatcctaaaatacttttgatccatagtggaaaaacagcaagatattgggcctatgtagacaagattataaaagaaagtccaccattaaaggatgttccggagtattatcgtagtcaggctggaatttttaacacatggtttcgggtgcaaaatattgaagaagcaaataaaaacattatgtcattatgcaaagtcgcatcttcaggtgctctattgtcaatggcatcaaagagtagcatgagtccgtattttattattgaatacgatgaaggtggtgaaggtaatgattgagaaaaaacctctcagtaatattttgcaattcaaaaatggtaaaaaaaggccaaaagatataggaacagtacctgtttacggaggtaatgggattcttggatatgcgaatgctggaaatagcaaggagtgcgtaataatagggcgtgttggtgcatattgtggaagcgtttattttgaaaaaaatgattgctggatttcggataacgcaataggtgcgtatgctaggaataatacagatattgtctatgcatattatttactaaaatcacaatgtttaaatgaaagaagaataggaaccagccaaccactactaactcaggaaatcttaaataatatagaagtcccgattttgtcgtataacgagcagattaaggttggcagattccttggaaaaattgatgaaaaaatagaacttaatacaaaaataaatgagaatttagcggcctagatgtccagtgaggagatatcaatttcaccggacatcagtttgggtaatagcgagtcgcgcaaagcggaaagccttcgattttctgcttcaaggatctcttgttccttgaatataggttcgcaaaaattgttaaaaaactgaatggtatcaacatcaggcataaccgtaggcacagatttcattcctgctccggatatttctttgaaagttgatccagaagccataccttcgattgtcggaagaagattcttcagtaaaaaatacacgtaggaagtaccgatcttctcattgggaataacggatttaaatccttggttggtagtgagttcgttttgagctatggcaatgtaacctattggagctcttgaactaaaaagtacagttccagcaggcattttttttgcactactctttgaaaatcccaactcagagatatcattctcgccatgagagataaattttgacttatcgattgataaatctttgggcgttatccatgcaataccttggtctgcatagtattccggcttcgattttgaaggggtgccgcccgcaacgatagaaccgatatctgaaagcgtgcattctggccaatttggatcagcattaacgacaaaaagatcttcaaaataggcttgtgcttgctgttctaaattctcatttaacctagcaactcctaccaacggcaggagtaaaaaccaacggaactgccgttgattcgttctctggaaataaatataaggagaacgaattatgaaacaaaaaattatggaagagattatacaacaaatgttgccgcatctcaataacgcacagttacaaaaattacaggaggtcatggaacattcgttttataactatgagatttcaggcaagactaaagagctggaagacgatagccaaaaactgattgacgcttttgtgtatgcaaaaagaattgagggatgttcagagaaaactctgaaatattaccggactaccatagaagccatgacggaagccatagataaaggtgttcgacatatgcagacggatgatcttagggcatatcttacagaatatcaagaaaagcatggttcaagtcgtgtaacgattgataatatccgtagaattttatctagttttttttcgtggttagaggatgaggatcatattctgaaaagtcctgtacgtcggatacacaaggtaaagaccgctaccaatatcaaggaaacgtacaccgatgaggagctggaaaaaatgcgtgataattgcacagaacttcgagatgttgcgattattgatatgctggcgtcaacgggaatgcgtgttggagaaatggtactgctaaataaggcggatattaatttcaatgagcgtgaatgtgttgtattcggtaagggtgataaggagcgagtcgtttattttgatgcaaggacgaagattcatctgaagaattacattgatagcaggaatgatgaagatccagctctttttgtaacgctgaggtatccacatacaagaatcacaatcggtggaatagaatcccgcttgcgagaaatgggaaaaactttagaaatagaaaaagtacatccgcataagttcagaagaacacttgcaacgatggcaatcgataaaggaatgccgatagagcaattgcagcagctcctgggacataaacgaatagatacgaccttacagtatgcaatggtcaaacagagcaatgtcaaacaggctcataggaaatatataggataagaggtttatttgatgaaaacggtaagagcagataaatattgcaaatttgttacagatggtacccacgattcacctaagcaagtgaataaaggaagaaagttaattacatctaaacatctgagtagatatgggattgactttgaaagcgcaaaaaatatttcagaattagattatcagaaagttatttcgcgcagtaaagtagaacaatgggatatattgtttagtatgattggtacaataggaaatttatacctcgaacgaaatcatacaatagagtatgcgtgcaaaaatatggggatatttcaaatgggaggagacgagagaaaggcaaaatggctatattattatttgcagactccaaaagccagaaaatatatagaaacatcgggcagaggaactacacaatcgtatgttccgttggctgcattgcgtgcattgccaatagatgtggtagatgattttacaagagataaaattataaaaattctttggaatattgatgaaaaaatactgaccaatatgcaggtaaatgagaatttagagcagcaaattgagtcaatcctgcttaaaaccattgataatgctaatactcagccagtaaagcttggcgattacctttatatcaaaggtcgcattggatggaaaggcctgaaaaaatcagaatatttaccaatttcagactatcgtatcatcaatggcgaaagtctcactctatccggaattgattggaataaagccggttacatatctgccgaaagatacgaggaatctcccgaaataatgcttaacatcggtgatatccttctttccaaggatggaacaattggaaagattggatatgtcgataagctggaaattccatcaagtgtcgcatctggaatttttgtaatcaggaataccagacaagctgaaatttcaacacagttcatttactatttgctgaaatctcggttgtttaaagcttttatcactagcaggacagagggaagtgttattccacatttgtatcaaaaggattttatggaatttgaattccagcttccttcacctgatgacatgaaaatttttgatgatactacggctgctatgttttccatggtgttttcgaatcttaatgaaaatgaaaggctcattcatttaagagattcattgctaccaaagcttatgtccggcgcaatcgatgtttccgaactagatctttaagctgctaaattctcatttaacatttgaagggagaattttatatgctaaaagactggaatttttggtgttctgtgattacggctttaacggctacactggcattagttttatctgttcgccaaataagtattagtaataaacaccagttatttgatcgtagaatggaagcgtacatgctgacaaatggacttatcgctctttgcaaggataattatatgtggctttctccaaaaagagaacaaatgccgcagtttgccaatgattatgtttttatatggcttaccaataatacttatatggaaaaacaggcagatgctattgaacatccgttagagcagccttttcacaaagaatttttgcaaaaaagagaagaaataagaatcacggcggcagaaattgatttgatttttaagggagaagcagcattagcatatagcaattttttaagaaactatgaggctgctttggctgtaatgtatgaatatcagattattattgataaaatgcagaaagaaaatgaaaaacacccaatgacgatagaggaagcagaaaaactgttttcagaagaaaaatatagggagaatctttataatgcattggataatcttaaaaaagcatatgatgcagtagcagaggaaaaagtagaaaaacagataaagaagcagcttaaattggtataaaaaggaggtccatcatgccgagtttgtttacagaagatacttatgaacaggccattattgaactgtttgagaatatggggtacgagcatttgtatgcaccagattatgatagagattatactagtccgcttctggattctgttcttagagatagtttagtgcgtattaatcgcggcctgacattggatgctatagaagaagcaatatcgaaattgaaaaatttcgataccggaagtttattacagaaaaacattacttttatggattatctgcagaatggtattactgtgaaattctttgtaaaaggcgaggagcagtcttcaattgttcggttggtggattatgagaaagaaaagaacaatactttttatgtggtaaatcaatttacatttctggagaatggtaacaatcgtagaccggatataattttgtttattaatggtctcccattagtgcttatggaattaaaaagtccagcaaaggatgaagtgggtgcagaaaatgcatataatcagattcgcaattatatgcaggatattccgtctatgttttattataatgcgatatgcgttatcagtgatctttctacaaataaagcaggaacaattacttctggcttggatcgatttatggaatggaaaacaaaggatggaaactatgaagaaacatcatatgctcaattcgatgtattttatgaaggaatgtttcagaaagatcgtctgttagatattttgaagaattttatccttttttcaggtagtggtcagggaagatttaaggttttggcgggatatcaccagtattttgcagttcgtaaggctattgaaaaagcgaaagtagcaacaaaaacagatggaaaaggtggcgtgttctggcatacacaaggatctggaaaatcattgtcgatggtattttatgcgcatttattgcaggatgctctggatagtccgacggttgtagttatgacagaccggattgatctggacgatcagttatatttacagttttcccaatgtgcagattttttaaggcagactccagttcaagcagaaagtaaggaacatttaaaagcattactggatggtagaagtgcgaatggaattatctttaccactatgtttaaatttgagcgtggggagaagcctttgtcagaacgcaggaatattgtggttatggcagatgaggcacatcgaggacaatatggatttgatgaaaaaattgtcatatcgaaaaatgaagatggagaaaaagaggcacatacagtaattggaaatgccagaattatccatgatgcattaccgaatgccactttcattggattcacaggtacacctatttctgcaaaagatcggaatactcgtgaagtgtttggtgagtatattgatgtatatgatatgacacaggcagtggaagatggagcaacccgtccagtttattatgaaagtcgtgttgtgcatttgaaattggatcagaatacgttagctcttatagattctacatatgatatattggaacagcagtcagatagtgccacaatagaaaagagtaaaaaaatgctcggacagatggaaagtgttctgggagcagattccacaattatatctttatgtgatgatatcgtggaacattatgaaaaatatagggcaaatctgctgacaggaaaagcaatgatcgtagcgtattccagaccgattgctatgaaaatatatcaccagattttaaaaatccgaccgacatggaaagagaagattggtgtggtcatgacgagcggtaataatgatccggaagaatggaaagaaatcatcggaactaagtcgcataaagaagagcttgcaagaaaattcaaagataataatgatccaatgaagatagccattgttgtagatatgtggctcacaggatttgatgttccttctttggctaccatgtatgtgtacaagccaatgcatgggtataatttgatgcaggcaatcgctcgtgttaatcgtgtatttaaagataaagagggcggattgatcgtagactatgttggaattgcatcggcattaaaggctgcaatgaaagaatatacgaagcgtgatcagtctaaatatggcgatatgaatattgcaaaggtggcgtatccaaaattccaagagaaactgcaggtatgtaaggatttattacatggtttcgatttcagcggattttttggtggatctccacttacaatggcaaaacttattactggtggtgcaaactatgtattagatgcaaaggcaccggacagaaaggatctttttttaaaagaggctatgcttctaaaacagtcacattcgctttgttctagtatgactacggaacgtgaacgtcatgaagccgcttacatggaagcagttcgttctacagttattaaagtcacttatggcggaacaggtggtaaaaatctgtccttgaaggaaattaatgctcagataaatgaattgcttaaggcggcagtccagagcgagggagtcattaacctgtttgatagtagcaagacaggtggagagaacttcagtttgtttgacccggcagtattggatgaaatttctcgaatgaaagagaaaaatatagctgtagaaattctgaaaaagttaatggccgaacaggtatctctgtataagagaacaaatgtggttcagtcacagaagttttcagaaaaaatcgcccagttaatgaatgcctattataatgggctgattacaaatgaagaggttataaaagagcttctgaaaacagcagaggaaattacaaatttgtataaaaatggtcagaagctcggtttgacacaagaagagttggctttttatgatgctcttactaaaccggagcatattactgatttttacaaaaatgatcagcttatagcactgacaaaagaattgacagaaatgcttcgaaggaatagaaccatagattggcagaaaaaagaaacagctagagcgacaatgcgtaagatggtaaagcggctattgaaaaagtatgattatccaccagaagattatgattttgcaattactacggtaattagccagtgtgagttatggactgataatagtagtggaatgtaaaaaaatttgtttttgtgaatcgcactgagggatagggtgcagtgcatctaaaaatttcaggtgaaaaaatatgtgattattatttgtcggatacacgtacggatattcaaaaattaaatctgtaatgtaaggtagtggtgctagtgtatttaatgatgagaaataataatcagcagatagaaaagaggtgtgacgaacatggactggaatctgttttggacggcattcggtgcaattggcggtactcttggtgctgttgctacaacagcagcagttgtggttgcattatggcaaacaaaatatagccaaaagaaaattataaaacttggcttttcagataattttcaattatataatcccaatacgggagaatcagtcaaatttatcgggataagtgttactaatacaggtaacagaaaggttatcatccgtacatggggagtgcatcttaaagagggaagtgctattgtaatgccacctgtggatgcgaatggaatagaaaaaatggtatatacaaagctgccacaaacattggatttggaagaatccatagatctgcagtggcagaaagataaatttcaattatttttgaaagctaatgaggataatatagagaagagtaagccgttagtcttttatgtgaacgatagtacaggaaaacaatacacagtaaaaacaaaaaagaatgcttcgtgttatttcaaagaataggactattgacaaatcgaacaagtgttcttataattaaagcatcgctacgttaggatacatatcgcagagtaacactatcaggttggttcactttcccttgactgaccacagtagtaggaggcgatggttacatgacatttgaaatcggttcgacagcttatattgtcgagagcaaccggattattcgtgaagtgactatagttaagcggaacggaaacttttatataatccggtttggtacaagaggtggcatccaagtgagaagcaacaggctttttgcaagctatgatgatgcggattcttccatacataaaaatacagaaaaaaggacgggatatcgttctccatatgactacatacactaaagtgaatggaaggggataattttgcaaaaaaaatatgattgacaatccccttcatattttatatactttagttagcaagttagcgaacaagcaagcgtgctaatatatgaacaccgatataaaaaatgaaatgaagaaatgaagaaaacgaaaagaaaagcgaaaacagagaaaaggtgaaaattatgatgtatgcgaattttggagaatttataagtaagaagagagttgaaaagaaaatcacattgaggaaaatggctgatatgttaggggtatctgcaccgtttttgactgatgtggaaaaagacagacgcaaccccttcgatatggaaaaacttacccaactcgcacagatactgaatttatcaaaagaagaaaatgcacagatgcttgaccttgctggaaagaagagaaatgccgtagcaccggaccttccagaatatattatggaacgggactatgtcagtgcagctttgaggacggcaagggacttggatgcaggagaagaagaatggaaccagtttgtcgaggaactaagaaagcgaaaggggtaagaacctgtatatgtatagacctgaaattaaaagaaagagatctggggcaccagtgttaagcagaaaagagattgatgttattggacagaatattgtcggggattttatgccggaagcattaaaatctccacaggaaatagatatcgatttgttggcacaagattatctgggaatggatcaggactttcagtacctgtcgcactgcggtgtttatcttggtatgacggtgttcaatgacacggacaaagtacccgtgtatgatccgcagaataattgtgcggactatatcagtgcaaaagcacataccgtgataattgataagacgctcttggaagaaaatcaggaacacagatatcgttttacgatgggacacgaggcaggacatgagtttttgcataaagaatattttgcctatgatcctgaccagataacgctgtttgacctgatgggagaaactccggcaccaatggttcagtgtcgtgtagatacaaaaaagatggattgccggacagcaaagagctggacagacagggactggatggaatggcaggcgaatgcattatcatctgcagttctgatgcctgtttcaatggtacggatggtagctgaaaattttaaacgaccaggactgcagcagattttttatcattatgccctggcagaagaagttgcttcgatatttaatgtatcatttgaagcagcaggataccgattgaaacagcttggatatattccacaagaggcgcatctgagcacagatattcttaacatgatttcttttgatttggcttgtaattactagcagaaggttgaagtatgcggattgcagaatgatccgcatatttttttgacctaagtgttagcaagttagcgaacaaacgaacaaaagaaaatatgaatattatgttgattcatggaacatattgtaatgttgacccacatagtaataatatgggtttcagaataaaatatgaagtaatattaggaaatatgcatactttttggttctaaaattcgacattgattaatatcctgaaaaagggaaatgtaaatttgtggaaagaaggtgagaacacatggcagatggagtaatacatagatgcaccaaggaatgcccatataataagaaatgttttgtatgcaaaacagaatccgaagtatcagggagtgttgtggtgcttcataaatgcatggttacgaaggaggatattccgattcagatcggaaaagaagaaaatgcctgtgttttatgatgggcaggacagtaaagttaataatcggactagcttgtaaagacagccactaggatgtgctgatattacagtagcctacgaaacagggatgttagtagaatgctgtaaaaaatcaggaattctagtggctttcttaaattcacccattttttagccaacagcctgttgaatggacagtctgttggcctttttgtttctaaaaaaggaaagctgacggattaggttaattacgcagataaatttctacattacggtgaacaaaagattaaagattttcaggaacaaaatggagaacaagtatatagatgcctgactacgatacagattttggcagtattgatgttcagttcagtattggatgtaaaaatacctaaccttatatattctcttattctctgcatttctgagtatatttttacgaaaaatcggcagccacgaggagaataagttattaggcataaaaaatgaagttttgatacgtctaaaaaatttttgaaaattattttttaatcgtgcaaaaagtctgcacctttaaaaattattctttagtcacaaagcaagagaacagaaaggaggtgagcgagagatggcaaaaaagagtatgacaccaagtgagcgccgtgaggcgattctcagggttttatgccagagaagacaggacaagattgataatcttgccgaagaattcggtgtatcagtccggactataaaaaatgacatcgaagaattaactctcgctcacccgattgagacagttcgtggaagatatggcggaggtgtaagagttgctgacggatattatgtcggtcgcaattacctgaaaccgaaacagcaagaactgctcaaaaagctgcaaagcacccttcagggtgacgatcttgaggtgatgaacagtatccttcgtgattttgctttgtaagaactatatttacgagaaccccacggccatgagagccgaatgagaaaggatgaattattatgatgaaaatctttatctgcagcccgtatcagggcaacatcgaggaaaacaaaaagaaggcagcatattacgcaaagatcgttgccaaagctgggaacgtcccagttgcaccacatatctattttccaaccttccttgatgagaagaatcccaacgagagaatgacaggaattgaaatgggactggaactcatggatacatgcgatatggtctatgttttcggttttgagattacggaaggcatgagattcgaactggaacatgccaaggaaatgaagaaacctgtaagactttatgacagaaattttgaacagatttgtgtcaaaacgcttccgattgatgaccgtgccagtgatgagtaccgttccctgattaaggggcagaagctcatgagataggagatccgccatgtcaggaagagtaaatgtcctttacggactgaatcagggtgaccgaattatggtcacccgtggaaaagagaagaaaaaagcagccgttgttaaggagtacccgttccatattctgatggattggggaaagtacaggtccagtgtaaacaaagttgatgtgtatacaggcgatgtgaaactggcacgcatttgaaaggagagaacgccatgagcgaagcattattattggtagctgagggctacgagcagattgctgcaggaatcagaaagatggttgcagcacagaaagatacaccaaagaaagatacaccaaagaaagaggagaagcctgtgaagaaggctgaaaagaaagaaactcctgtggcagatacaccgaaggaagaagctgcaccgaaggagacagccgttgacagaaagacggtccgtgctttccttgctgacaagtccagatcaggaaagacatcagaagtcaagaacctgattgagcagttcggattccagaagctgtcagatgttcctgatgagaaactgccggaattgtatgagaaagcgcaggtgctctaatgggcggacatgcaaggttctccccatcgtccggtaaaagacgcctggaatgccctccatcgttactgttggaggagcagtttccggacgaagaatctcccttcgcagcagaggggagtgccggacatgcgatggcagagtacctcatcaataaatatctgaagagaaggaccaaaagacctgtatctgattattattcggatgaactgctcgaagctgtggatgattacgtggaatataacatcacccagatcgaacaggtaaggaaggactgtgatgacccgttcatcggagtggaactgaaggtcagcctggcacacagaatcaaaggatgtttcggtaccgcagatatggtggtggtcgattcccataagatccatattatcgatctgaaactcggcaagggtgtggtggtcgatgcagaacagaatgtccagcttatgatctatggactgggagtcctggacatgcttggtttcttatatgaaatcgacacggtggagcttaccattgtccagccgaggatcgaacatttttccacctgggagatatcagccggggagctgcttgcatggggaaaggacgtccttgaaccgggagcagcaaaggctctttcaggcgagggagagtttaaagccggagaccactgccgattctgtaaagcaagatttacgtgccgtgcaagggcagaggaatatttaaaacttgcccagatggaatttgcagagccggcccttatgtcgaatgaggaaattgcagaagtcctttccaaggcagatgcgctgaagaaatgggcagaggaggtttacacctatgctcagaatgaagcagtagttaaccataaagaatggccgggctataagctggtcctgggaagaagcaaccgtaaatatacggatgaagaggaagtggcagaggcagcacagaaagccggatacacggacatttataaaaagagcctgatcggcattaccgagatggaaaggctgatgggcaaaaagaaatttaatgagatccttggttcactggtgtacaagcctgacggcaaggtcacactggtgccggattcagataaaagagaagcagttaaaacagcaaccgcagaagcggattttaaggaggactaaattatgacagcagcaaatttaacaaaagtaatcgtaccttgcagactcagctatgcacacctgtgggagccggattctatcaacggaagcgaaccgaagtactctgtttcctgtatcatcgacaagaatgataaggagaccattgccaagatcaagaaggcaattgaggtagcaaaggatgaaggaaaaggcaagtggggcggtaagatcccggcgaacctgaagacaccgttaagggacggtgacatcgacagaccggaggatgaggcgtacgcggacagcatgttcttaaatgccaacagcaaacaggcccctcagatcgtggacagacaggtacagccgatccttgaccagagcgaggtatattccggctgctatggaagggtatccattacattttacgcttacaattcaaatggcaacaaaggcgttgcagcaggacttggaaatgtgcagaagttaaaggacggagagcctctcggttccagagccaatgcgaaggatgaattcgaggcagtggatgcggaggacgatttcctcgcatagggacaaggcagcagatcataggaagggcggtggcatacaccgcccggatacataaaggagatgtactttcgtggaagaactgatgaaggagcttaacagcataaaaaaatatatcccgtataacacataccgcaccatcaaaggacagatgaagtccagcaatgtggaagcagcaagaacggggatcaacagaataaagaaaagagcggagggacagaaacatggacacacttgcaattgatattgaaacatactcagatgtgtcgctgccggactgcggggtacacagatatgcagcatcggagcaattcgagatcattttgtttgcatacagtctgaatgacgaaccgacacagattattgacctggcgtccggggagaagataccggatgagatcatggaatatcttacggatgattccgtaataaagaccgcttataatgcagcattcgagcggaactgtatcaaccgattcttcggtctttccttaaaaccggaaggatggagatgtacgcttgtccaggcatccatgctgtcacttccgctgtcattggaaggcgtgggggaagcactgaaccttgataagaaaaagatgtccgagggaaaagacctcatccgctatttctgtatgccgtgcaagcctactaaggcaaacgggggcaggacaaggaatcgtccgtctgatgcaccggagaagtgggaactgttcaagacatactgcatccgtgacgtggatgtggaaaaacagatcaggaataaacttgcgaagttcccgataccggacagggagcaggaactctactgcatggaccagaggatcaatgacaggggcatcatggtggatcaggagcttatcggacacgctgtggcatgcgaccttctgtataaggagacggtaacgaagaaggcatatgagatatcaggactggaaaatccgaacagcgtattgcagctcaaggactggctgaatgaaaagggaatcgaggtggattcccttgccaaggctgtcgtggaagaacttgtggagaacacacagggtgatgtggcagaaatgatgaagctgagacttgccatgtcaaagacatccgtaaagaagtacgaagcaatggagcgttcggtatgtcctgacggcagggtgcatggattattacagttttacggggctaaccgcacgggcagatgggccggcagactcgtgcagattcataaccttccgcagaaccatatggaagacctggaactggcacgctcccttgtaaaggaaggcagatatgacctggtggagcttttgtatgattccacaccggatgtgctttcggagctgatccgtaccgcattcgtggcaagacccggatgcagattcatcgtcagcgatttttcagcaatcgaggcaagggttatgggctaccttgccggagagggatgggtcatggaggagttccgtggtgccggaaagatctatgagcagacggcatccaagatgttccatatcccaatcggagagatcacaaagggaagtccgtaccgtgcaaggggaaaggtggcatcacttgcctgtcagtatggcggtgcggaaggtgcgctcatcagcatgggagcattaaattttgtggaagaagaggaactgaaagggctggtgcagtcgtggcggacggcaaatccgcacatcgtgaattactggtatgaaattgatggtgcggtaaaggcagccgtgaaggagcggaagatgacaacggtcggaagggtaacggtatattaccagtccgggatgttaaagattgcactgccgtcaggaaggatgctgtcttatgtaagaccgaggatgaccgtgaaccgattcggttcggaaagtgtcagttatgaaggtgtcggcacgaaccgcaagtggacgagaatcgaatcttacggggcgaaattctgtgagaacatcgttcaggcaatcgcaagggatgtactggcagaagcgatgctgcgtctggaaaagaagggatttgatattgtgtgccacatccatgatgaggtggtgcttgaagtgccggaggggacatcttcggtggaagaagtaaatgagatcatggcggtatgccctgactggtgtgaggggcttccgcttaaggctgccggatttgaaagtccgttttacaagaaagattaggaggcagaaacatgtttgtatcaatcggaaactcaagaatggataaaaagtttaactgcacggatatggcatacgaagattttgtcagccgtctgtccaagacaaaatatactgcggaaacaatggagcagtacaggaagatgccgaaagggcagcaggacaatatcaaggatgtcggaggtttcgtgcttggaaagctgaagggcggacgcaggaagaaggactgcgtgatttccagatccgccatcacgcttgatatggattacggaacacagggcatcatagatgaactggaaatgttctttgacatgaagatggtggtgtattccacacataagcatacgccggagaaaccgagacttcgtatcatcatattcctgacaagggatgtgacacccgatgagtacggggcagtcagccgtatgcttgcatcggatatcggcattgagctttttgatgattccacctatgaaccatcaagactgatgtactggccgagcacttccagtgacggtgagtatgtgtttcaggagattgaagggaacgaagtcgatcccgatgaagtgatgtcccgttataaggactggcatgatgtatcagcgtggccggtcagcaaccgtcaggcatccgttgtgcagagggatatcaaaaaacaggccgacccgctttccaaggacgggctgatcggggctttcaaccgcacatacacggtgacacaggcaattgacaaattcatcccggatgtgtacagacattcaagggcgattcccggtagatatgattatatcccagcggattcggctgccggagtcgtggtctacgatgacctgttcgtatacagccaccatgccacagatccatgctgcggaaagctgatgaatgcgtttgatgtggtaaggcttcataaattcggggacaaggatacaagggcagccgaagggacagagccggggaaactcccgtcttttaaagccatgcaggattttgcttctgcagatgaagaagtaaagaacacacttgccagggaaagacaggagctggcggtacaggaattttccaccgagccggacgaggactggcagaacaagctggcacttgaccgcaggggaaatattaaggatacactgcagaacatcgcactgatcattcgcaatgatgagaatttcaagcatatcgtgtacaacgagttcaaggacaccattgatgttatcggtccgcttccgtggaaacaggtaaagcccggatggaatgactccgaccttgccaatgcaaaggtgtatttcgagagggtgtacgggatctggtcaccgaccaagtttaaggatgcactgcttgccgtggtgtcatccgacaggctttatcatccaatcaaggattattttacaacacttcactgggacggacaggagcgtatcgatacactgctcatcgactattttggtgcaaaagattcaccgtacacaagggcagtcatccgcaagacactggtggctgcggtagcacgtatctataagccgggagtaaagttcgattccatcctcgtattgaacggcccgcagggaatggggaaatccaccttctttgccatccttggaaagcagtggttctcggattccttatccatttcggatatgagggataagactgctgccgagaagctgctcggaaactggatacttgagatcagtgagatgaacggtatccgcaagacggaagtcgaggtagtaaagtcctttgttacccgtcaggatgataagttccgtcaggcatacggagtcaatgtagagtcgcatccaagaaagtgcatcattgttggaagcaccaactccgagggcggattcttacgtgacgtgacaggaaacagaagattctggcccgtgcatgtgccggggacaggaaaacaccatccgtgggagcttgactgtgtcgaccagatctgggcagaggcaatccatatgtataacgaaggcgaggagctgttcttaaaaggtgcggaggcagaggaagcgtataagatgcagcaggaggcaatggagtcggatgaccgtgagggcatcgtgcaggactatcttgacagactgctgccggacaactgggcatcaatggatatctaccagagaagggcattccttggcggtggtgagttcgagacggtcggtgtcaaaggaacggtcatgcgtgagcgtgtgtgcatcatggagatctgggtggagtgcttcggcaaggagcgccagaacttaaagaaggcggattcctatgagatcgaaggcatcttaaacaagatcgggggatggaagaagtatgattccaataccacgggcaagaccaaagtccccctttacggagtgcagaagacttttgtgaggatggatgagaaaccagaggaaacccgttaggcggtttccgaggtttcccagatgcagatgggcaacggtagtcggaaaccgtgctgacaccttggaaaataaggggttgcggttcttagtttcccagtttcccattaaatccagttgagaattaaaaataaagataaaaagagcaattcatgtatatatgcgcgtataggagttaaaggcatatggcaaccgcaatcggcaaaggaggtatctggttttgctagaaagtacagtagagagacatttgagggaagaagcgaaaaagcggaaaggcatggcgttaaagttcgtatcacccggtatgaatggagtgcctgaccgcatcgtcctgatgccggacgggaaaatggcattcgtggaactgaaagcaccgggtaagaagccgagaccgcttcagctgaagagaaagagggtgcttgagaggttaggctttccagtttatgtagttgataatatcgaacagatcggaggtatccttgatgaaatacaaagcacatgattatcagcagtatgcaacagattttataatcggacatcccgtgagctgtctgatccttgacatgggacttggcaaaacggtcatcacgcttacggcactgtggcttctgctgtttgactattttgaagtaaggcggatcctggtgattgcaccgaagcgtgtggcagaaacaacatggccggcagagataaaaaagtgggagcatctttacggcatgacatttgccgtggcaatgggaactgcagggcagagaaaggaagcacttctgtcaggagccgatgttacgatcatcggaagggacaatgtttcctggatgacaaaaaacatattttttgattttgacatggtcgtgatcgatgagctgtcgagcttcaagtcaccgaaggcacagaggttcaaagacctgaaaaaagtaaggccgagggcaaaacgtgtggtcgggcttacgggaacaccgggaaacctcatggacttatgggcagagatagggatccttgatatggggcagagacttggaagatacatcggaggataccgtgacaggttcttccttccggataagcggaatcgtgagatcatcttttcgtataagccaagggaaggagcagaagaaaaaatatatgaactgatttccgatatcagtatttccatgaaagccgtggattatcttgatatgccggaatgcataagcaaccgtgtgaccgtatccatgtcggaatcagaacaggaactttatgacaggatggcagatgaaatgatcctagaatacggggaaggacaggacatcgatgcggtaaatgcagcagccttaagcaacaagcttcagcagatggcaaacggtgcggtctatgatgaatccggcaatgtccgtaatatccatgacagaaaactggatgctctggaagacctgatcgaatcggcaaacggaaaaccgcttctggttgcatactggttcaagcatgacagggagcggatattaaaacggtttccggcaagggatatcaataccaagaaagatatcgaggaatggaatgaaggaaagatcccggtggcgctgatccatccggcatcggcaggacacggactgaatcttcaggaaggcggttcgaccatcgtatggttctcgcttacatggtcccttgaactgtatcagcagttaaatgccagactttacagacagggtcagaaacacacggtcatcatagagcatctggtgacagaaggcacggtcgatgaagatatcctccgggcaatcgaaaaaaaggatactacacagaatgcaatgatagaagcagtaaaggcaaggattggaggtatgacggatgacggcagaagtaatgatgaaggaatataagaatatgaaaaaggaactgaccgtgactgagttccagctccgtcagtttcagggagtgagcgaacaggatatgatcgattccatgttttactcccatcaggaaggggaaagggtgcagacgagcactctttccgataaaacggcaaacatagcagtcaagtataaggctgcaatggaaagggaaaatgacgagtggtatgatttccttttccacagatatatgttcctgaaggaagaactggattttttcgagcatgcggtgaacggactggatgaaagacatagaagcattatcacggatcttctggatgaggacatgacatgggacatcatgatggaaagataccatgtgagccatacgatgatcgggaaatacaggaaagcagcattgaaggaactggataaacagtatgaactgagagacagacaggtggaagcctttgtcctcggataggaggtttttatgtgtaagcgtggagatatttattatgtggatttcggagagaaggccggaagcgaacagggtggtgtccgtccggcactggtggtaagtaataataaggcaaataagcattcacctgtggttacggtcattccattgtcggcaagggtgtggaaaaagaagtatcttccgacccatgtgcagatcccgctgaagaaaagcagcggtctgaataaaccgagcatggcactggcggaacaggtggaaacccttgataaaacaaggctaggagaaagaatcggggaagtgctggatgacatggtcatggagcagatcaccgtagcactccagatacagataggtgcatatgcagagtacaattaaggcagtcagacggctgtcttttttgtttggattatggtagaattgattttgatgggggtgcatgatgaagataaaaatagatttttttaataaaaatattatagatgcaatcggtgctggaatatatcaggtatcgataatgaataatggaaaagaagaagttttatatattggagaatccgtgtttgtgcttgtgcgctgcggggcgcatttatttgaacttaagaagactccagaatatttcggttttaatgatgaaactataaataatgagaatattatcttgaaatttgaactgttggaagctattagtaatatggcggatagaaaacatagggaaaaagaattgatacagaaaaagaagcctattttacaaagtggaatcagtgacagaatgaaatcagtagaagaaaaagtacaggcacttacagcttttctggaaggagaatgataaatggcagagaaaagaacaacaaatactaatgtgacaagatatgataaagcacataaaaaatttatggataagctgaatgttttaaaggacaatgtaaatcatggttatgattctttgaaagtagtacataaacagacgatagattcatctgtcagttttaaggagaccgtagataaaggtcaggaacaagaaagaaaagatctttatgatattataaagacctcggaagatgagaaaaaaatccaatgggcgaaagagcgtattcaggaacttgatcgtatcaaggaaaaagaaatagacggacataatgaatttttgaaagaagaaggagatacgacaaaaagaaatatcgtaggtggtatgatgctgattgctgtttctgcaaaacttatttccagtaaacaagtaaggcagatgggtgggaaagctatcagttctgttggtaagagtctgcttcgcttaaagaaataaaaaggtggtgtactagaggtttactaaaggtgcactaatggtttactgactttttaatttacaggtgctatgattaagatggcaaaaaagaaagggagcggaaacgctcctttttatgttgccgtaaggcggtgtctttccaatcctttcacaccgcccgtgtacatagaagggaggaatggcagatgccgatgaaactaaagaagccgtgcagacaccccggatgtccgaagctgacagacggactgtactgcgaggagcatgaagcactgcaccgtggtgacagggcgagcagcaacaagcgtggttacaacaggcagtggcagaaggcaagggcaagatacttgaaggcacatcctttgtgtgttcagtgcttaaaggaagggcatgcggtgacagcaaccgtggtcgatcatatcagaccgcaccgtggtgatcccgtcctgttctgggacgagaagaactggcagagtctttgcaagccatgtcatgataaaaagacatggaacgaagataacaatcctgagtatcggttctgacggcagaccgtgggggtatccgaatctctaccgtctgaaccgctgaagaccgatggccccctttgcgtgaattttcgcagaattaaaccggggggatataaaaagggtatggtaattttcgcagaatgtacttaaaacacggcaaaaaggggtatttccttttgccggaaaatcaggaaaaaagcattatttaaggctggaaaacagtgtaaaaacattgtttttccggtctttttttgtgtgccggaaggagagtggaaaggatgacggacgcacaggcaaagcagatcaatgagatgcggatgaaggggatgggctataaagccatcgggatggcaatcggactgtcccgtgacatcgtaaggaattactgcaagagacataaccttgccggatacgccacggtggtttcaaaaaatatgaaactcatggtggacggtaaagaggtgtgccacttttgcggtaatccgatcacgcagccgaagaccggcagaccgagaaggttctgctgtgaaaaatgcagaagggaatggtggaaggcacatccggaagcagtaaagaaaagcgagaaggcttcctacacgcttgtatgcgagcagtgcgggaagcctttcatttcctatggaaacaagaacagaaaatactgcggccgtgaatgttatttccggcacagatttttatcagaggaggatatggaagatgcagtttcagagttataaaatagcagaccttatcccggcttcctataatccgaggaagaagttaaaacctggtgataaggaatatgaaaaaatcaagaactccattaaggagttcggatatgtcgagccgatcatcatcaactcagacatgaccattatcggaggacaccagagagccacggttcttgcagacctcggatacacggaagtggaatgtatcgtgatcgatatcgacaagaccaaggaaaaggcgctcaatgttgccctgaataaaattacgggcgaatggaataaggaactcctggctgaccttatcaaagaccttgaagattcggattttgatgtcggcatcacgggctttgaaccgccggagatcgaacagctttttaattccgtgcatgataagaaaatcaaggaggatgatttcgatgtggaagcggagcttgtaaagccgaccgtggcaaagacaggagatgtatggctgcttggaaagcaccgtgttatatgtggtgattccattctgccggagacttacgataagctgatggatgggcaaaaagcaaatcttgtcctgactgatcctccatacaatgtaaatgttgaggagacggccggcaagatcaaaaacgacaacatgccggatgaggatttctataagttcctgtttactgcatttgtaaatatggagcagtcgatggaacaggatgcatccatttatgtattccatgcggatacggaggggctgaatttcagaaaggcattcaaggatgcaggtttttatctttccgggtgctgcatctggaagaagaacgcactggttcttggaagaagcccataccagtggcagcatgagccgtgtctgttcggatggaagaaaggtgggaagcaccagtggtattccgacaggaagcagaccaccatatgggaatatgaccggccgaaggcaagcaaggaccatccgaccatgaagcctgtggcgcttatggcatatccgatccagaactcctgcatgagcaactgcatcgtgcttgatccattccttggttccggctctacgctgatcgcctgtgagcagacacaccgtatctgctatggcatcgaactggatgagaagtttgtggatgtgatcgtaaaccgctacattgaacagtgtggttcggatgcggatgtatttgtcattcgtgacgatatgaaaatttcatatcagcaattatgtaagggagggcagtataatgaaacagaagacctttcttgattcatgctctagcatcgacggtttcagaattggcacttaaactgatggccataaatgtattggatctcagcaacgcttgtaggaaatgcagtcaccgcaacggttgcttatgcggttgcgatgtcacttccggagtccagaagctgacattacattttcttttggaaagtaccattatctgcttgactatacgggcattcagagtgatatatggtactaccaaaaggaaaggagaccagcagaatggaaattattacaaacgctgagaacaggaaagaattagtaaaagtcttatccggacatttcggacagaggtcagaataccttggaccgccatcctttgcataccgcattggaagcatcacggtggacagggacgcaaaggtcatacttgaagatgacagcatggaagacgaggtgagaagggtgcttttccagaatgacgtggcagaagagacacaggaaacacagacggaagaaccggaagcagagatcaaaatgccgatcggcagcatgacacctcagggcatcatcaacctgataaacatgatgcattccaaacagtaccttatcaacagggcagtcggcagggagtgcatttccatagcagacagccttataaatgccctggccgaaagaacctttgaagacacagagacggcagcacggttcattacggaacagggtggatgcagtggtgtcacctttgcagatgggaacattgagttcacgggatttccgcataccgatagcatgatggaatactgcggacttgcagcggcaatggtaaagaaagcatcggaacagaaacgtgtgaatccgaaacagaccattgaagagaatgaaaaatattacatgagggcatggctggtatccatcggatttggcgggagcgaaggaaaggaaacaaggtccttcttccttaaggggctgaaaggccatacggcattccggaccccggaagatgcggataagtggaaagccaaccgcagggcagaaagggggtcaacagtatgttcggagtaagcagacagatacttgagagactgagaaaggaatatcctgcgggaaccagggtggagcttatccgccttgatgacccctaccgaaagatcccgtcaggaactgccggaactgtggaatatgtggatgatgcaggacagctccacacggtatgggacggacacgggtcactggcgatgatctatggagtggatgaatggagaaaggtaaaagactgatggataagattgcgacggtctgctatggtaaagaagagacatgggaatcgaagaaagctgcggagcagttcttccttcgagccatgatgtgatctgatggcagtgaaagggaacgctatacaaatatctacataaaactgcagatgggtatgaccttctgcacagatgaagaattttaaaagaggagaatgaagtgaaagaagtcagaggaaaactgatggcattgatgaaaaagcatcagatggatacaacggaattttcggaaaaatgtggaataaaggaagaacgggtggaacggctgcttggcggcaggggaaaacccagccatttggagcggatgtgtatcgcagaagcttttgggatgacagaggaagagctacaggatatagaaccgctttcgcagacagaggtccgggaggtgcagacagacggcattgaaaaagtgattgcagaacggctgcaggagctcgtaaagattcatgggataggaatccctgaacttgcagaacggtgtggtttaaaaagacagagagcaaagaaacttatgaatggtgaagttaagatgagcattgcagaggcagtcagcatcgccaatgaatttcaggtctctttggaatatctgttaggaagatatccatatccgctgccagcaccacagacagaggaagaatggatggtatacgaaaaactcggacagatggatgaaaatgaagcccagaaatatttagaaatgatgatgccgatgaaaaagggattgtcataatttacacagttttcccttgaaatctttgtgtagtttatggctcacatataactggatatatgtgtgttttagagcgaatatgtacctaccgaaagggaagaaaacaaacggaggtacaagccatgaacgaaaggattacaaagcagatcgaggaaatgaagaaacagaccatcggggtcgaggttgagatgaataacatccgaagggataaggctgcagaacttgcagcggcattcttcggaacaggaagatttgaaaacacggcttccagaaacggatattatacatggtccgcatgggatgcaagcggaagggaatggaaattccagaaagatgtcagcattgcgggaccagatgataaaaaatgcgagctggtcacaccgatccttcactacgaagacatcgaacttcttcaggaactgataagaaagctcagacatgcgggagccaagagtgatgcaacaaggggatgcggagtccacatccacatcggagcaaatggacacacaccgcagactttacgaaatcttgcaaacatcatggcgggacacgagaaccttttagcggatgccttaaacctcgacagctggcggatgaaccgctactgcaaaacggtagacccaagattccttaaggaactcaataaaaagaaaccaaaaacgatggcagcccttgcagacatctggtacacggcaaacggggcaagctacggaagagaccaccattacaatgacagccgataccatatgttaaactaccatgcaacattcacaaagggaacggtcgagttcagacttttccaatttgatgctccggctgacggaaagctgaacggactgcatgcgggacagctgaaaagctacatccagctctgccttgtcttaagccagatggcaaaggaagtaaggacggcaagcccgaaaccgcagcagacagaaaatccgaaatatgcaatgaggacttggcttttacgcctcggattcatcggggatgaattcaagaccgcaagggacatccttacaaagagacttgcaggagacactgctttcagaagcggaagagctgcttgaagagaacagcctcctgccaccttggagcattgaccgccatgtgcggtcttaaggtggtagaagggtgttcccttcagaaaggatggagcattatggagaaaagatattacattgcttatggcagcaacctgaatttacggcagatgaaaatgcgttgtccgaccgcaaaggtcatggggactgcggtcatcaaggattacgaactgcttttcaagggaagccttacaggggcataccttacgattgagccgaagaaaggcagtgaggttcccgttgcggtctggaccgttaccgaagcagatgaagaggcacttgaccgttatgaaggatgccctgttttttattacaaaaaggatatggaactggatatcaagggaatacggacaggaaaaataagaaaaagaaaatgctttgtgtatatcatgcacgaagagcggaaaatcgggattccttccctttcctatgtaagaacatgccttgaaggttatatcagtttcggatttgatgagcattatctttccgaggcacagatcagggcggtgaaggaggcaggatatgaagactgaaacattaagaataaggatctgcccgaaatgcggggcaggatacacacggacacctgccctttcaagggaagataaccagacgcttatctgtccagactgtggaacccgtgaggcacttgcaagcatgggcgtgagcagggaagaacaggaagaaattatagagaccatacacaggtcaaacagatagcggttatgtaaaaaggcttcttcgggagtctttttttgttgccatttttacagggaggtgaggacagtggcacaaagaggaagaaaaccaaagcctacggcagtaaaggtgcttgagggcaatccgggcaagagaagccttaatacgggcgaaccaaagccggagaaaaaagccccgcgctgtccggcatggcttgaggatgaggcaaagaaagaatggagaaggatggcgaaacagctggagcatctcggcatcctgacagaaatagatatggcagcattcgcaggatactgtcaggcatatgcgagatggaaagaagcagaggagtttattacacagcacgggaccatcgtaaagaccccgagcggatactggcagcaggtaccgcaggtatccatcgcacagacatatctgaagatcatgaataagttctgtgagcagttcggactgaccccgtctgcaagaagccgtatctccacggacagcggggaagataagcagaatgatgaaatggagcttctgcttgtgaaaggcggtgcaggataatgtttgatgaagcaaaagcagatcatgcagtcaattttataaactgcctgaaacacaccaaaggaaggtggaggggagttccgtttgaacttctcccctggcaggatgagatcatccgtaccctttatgggacggtaaaggaaaacggatacaggcaatacaatacctgctactgtgagataccgaagaaaaacggaaaatcggagctggcggctgccattgcactgtatatgacatgcggtgacggtgagtggggagcagaggtctacggctgtgcttccgacagacagcaggcttccatcgtattcgatgttgcggtggatatggtagaccagtgtccggcactgaagaaaaggatcaagcccgtcatgtccgtaaaaaggcttgtatataaaccgaccaacagcttctatcaggtgctgtcggcagaggcgtacaccaagcacggtctgaatgtccatgcggtcatctttgatgagctgcatgcacagccgaaccgggaactgttcgatgtcatgaccaaaggttctggtgatgccagaacacagccattgttcttcctgatcacaacagccgggacagacaggaattccgtgtgttttgaacagcatcagaaggctctggatattattgaaggaagaaagatcgacccgactttttatccggtaatttatggggcttctgatgaggatgactggtcgagtgaggatgtgtggtataaggcaaatccgtcacttggatacacgattgatattgagaaagtgcagaatgcatatatcagtgcaaaagagaatgcggcagaggagaatgtgttccggcagctccgtctgaatcagtgggtgaaacagagcacccggtggatgcagatggataagtgggatgcctgctcctttgcagtgaatgaagaggagcttctcggaagggaatgctatggcggactcgacctttcaagttctacggatatcacggcattcgtgcttgtgttcccgccaaggaatgataccgagaagtatgtgatccttccgtatttctggataccggaggataacatgaaactgcgtgtacgaagggatcatgttccgtatgatgtctgggcagccgaagggtgtttaaagactacggaaggaaatgtcatccattatggattcattgaacagtttattgatgaacttggtacgaaattccatattaaggaaatcgcctttgaccgatggggagcagtacagatggtgcagaaccttgagggcatgggatttaccgttgttccatttggacagggatataaggatatgagtccaccgaccaaggagctgatgaagctgacgctggaagggcggatcgcacatggcggtcataaggtgctgcggtggatgatggataatgtgtttgtccgtcaggatcccgcaggaaacatcaaaatggataaagaaaaatctacggagaagatcgatggggctgttgcaaccgttatggcacttgaccgtgcaatcagaaacgaaggcagtgacggaagtgtatatgatgacagaggaattataatattttaacagcggaggtatcgtatgggaattaagagtttatttggatttggacaggcgagggataaacctgtggacaaggcagcagatgcgggatattcgtttctgttcggaaggacaacaagcggaaagcctgtaaacgaaagaactgcaatgcagaccacggcagtatatgcctgtgtcagaatccttgcagaagcagtggcgtctttaccgcttcatgtatatgagtatcaggatgacggtggcaagaagctggtgcatgaccatcctttatattatctgctccatgacgagccgaacccggagatgacttcatttgtgttcagggaaacactgatgagtcatcttttaatatggggaaatgcgtatgcccagatcataagggacggtgctggaagggtgcttgggttttatccgctccttccagataagatggatgtgcagagggatgaccgtggaaacatctattatgtgtattccagaaacagtgatgaaaaccccatgttcaaggaatatggagatatcaggctgaaagccgaggatgtgcttcatatacccggactgggatttgacgggctgattggatattctccgattgcgatggcaaagaacgctgtcggcatgacgcttgcctgtgaggaatacggggcgagtttctttgcgaacggagcaaatccgggcggtgttttggagcatccgggagttctgaaagatccatcaaaggtgagggaatcctggaactccgtataccgtggcgtgaataacgcacacaagatagcagtgcttgaagaaggcatgaagtatcagcagataggcatcccgccggaagaagcacagtttcttgagacaaggaaattccagatcaatgagatcgcaaggctttacaggataccgccgcatatggtcggtgatcttgataagtcgagcttttccaatatcgagcagcagtccttggagtttgtaaaatacacacttgacccgtgggtgatccggtgggagcagtctttacagagatcactccttctgccgggagaaaaaggaaagtattttatcaaactgaatgtggatggtctgctgagaggggactaccagtcaaggatgaacggctatgcggtcggaaggcagaacgggtggttttctgccaatgatatccgtgagatggagaacatgaacccaatcccggatgagcagggaggaaacctgtatctgataaacggagcaatgaccaaacttgaggatgcaggggcttttgcaaagacagatacaggacagcagaacactccggcacaggaaaacagcggaaagagaggtaaacgatgaagcagaagttttggaactggataaggaatgaagatgagagcgtgcctgacatggaaaggacgctctttttaaatggcatgatttcggatgaaacatggtacggggatgaagtcaccccgcagcttttcaaagatgagctgaatgccggaaatggaaatatcacggtgtggatcaattcaccgggcggtgatgtgtttgcagcagcccagatctataacatgctccgtgattataagggaagtgtgacggtcaagattgatggtattgcagcttcagcagcatccgtgatcgctatggcaggagatacggtctgtgtatccccggtggctatgatgatgatccataatcctgcaacgatggcaatgggtgaggcgaaggatatgcagaaagcaatcgccatgctgaatgaggtcaaggaatctatcctgaatgcctatgaattcaagacggggcttacccgtgcaaggctctcacacatgatggatgacgagacctggttcaatgcaaagaaggcggtggagcttggctttgcggataagatcctttttgattccgatgaggatgagaaaaagaaaaagccggatgagccggaagaaaagccggagaaaggaagcaatgaagagaaaggggacggagagggcgataaggacaaaaacgggaaaaagaagctcccgttccagcaggattccatgatgttttccaccaaggcgatgaatgagtcgttcctttccaaggtgtccgataaggatgccatgataccggtcaaccagttggagaagagactgagtctcttagcacattaaggaggatatgaactatgagtaagattttagaattaagagaaaagagagcgaaggcatgggaagctgcaaaggcattcctcgatgccaagagaacacaggaaggttttgtatctgcagaagatgcagccacctatgacaagatggaagcggatgtcgtaaatcttggaaaagagatcgagagactggaaagacaggctgccattgatgcagagcttgcaaaggcaacaagcaccccgatcacaaaccagccgcatgccggaactggcggggaggtaaaaacaggaagggcaaccgatgaatacagaagagcgttctggaatggtatgagaaacaaaatgtcatacgaagtacagaacgctctttctattggtacggattccgagggtggatatcttgtgccggatgagtatgaaagaacactggtggaagccctgaatgatgaagtattcttccgtaatctggctactgttatcaagacatcgagcggtgaccgtaagattccaatcgtcacatcaaagggtgaggcagcatggatcgatgaaggaggtcagtttacagaatccaatgacagttttgggcagacaaccattggtgctcataagctggcaaccatgatcaaagtttcagatgagcttttaaatgacagcgtgtttaatatcgaacagtatatttccagggagtttggaagaagaatcggtgcaaaggaagaagaagcatttttcatcggtgacggagcaggaaaacctacaggtattttcaacgcaacaggcggtgctgaaacaggagtgacagctgcaaataccaccattacgtttgatgatgtcatggatctttactattcccttcgtgctccataccgtaacaaagcggtatggcttctgaatgattcgaccgttaaggcgatcagaaaactgaaggatggaaatggaaattatatctggcagccctctgtaagggaaggagagccggacagaatcttgaaccgtccttaccgtacatccatttatgtgccggagcttgcagcaggaaaacgtgtgatggcattcggtgattacagttattactggatcgcagaacgccagggcagaagtttcaagagactgaatgagctttatgctacaacgggacaggttggatttctcgcttccgaacgtgttgacggcaagctgatcctgtctgaagcagtgaaaacactggacgtgaaagctgcaggaaagtaggtgggctgaatgtttgtaacgcttgaggaagccaaagggtatctgagagtggattcatcagacgaggatagttttatcctcggtctgatggaaactgcaaatgccttgattaaaaatgtaacaagacggactccagcggtacttaaaaagcatgaagcagttgtgcggacagcggaattgtatgtgatcgcttacctttatgagcacagggaggaagccgaccataaggccatgacggagaccgtgaaatatctgctctttggtatacggaaggagaagttttaatgatcgagttgatgcgtgaccggatcacgctccagaaaagttccgtgaaaacagataagatcggaaaccatacggcagtctgggaagatgtgtattcctgtgctgcttatgccaataacctgtctggaaaagaatactgggcagcaaagcagttgaatgcccagtctgaactggattttattatccggtactgcagcgaggtggcagccctggacattgagcattaccgcatcaggttccgtggggatctttataatattacgtttattgataacgtgcagtataaaaacaaatctgtcaggatccgcgcggaacggatcaaacggtgaggtaaattggaaatggcaaagaaaatcaaagcggatgcccttgcatcggaagttatgaaagagttggacgattattccagcctgactacggaagtgatgaagaaggcggtcagaaatgccggaaaaacagtccgggaggagattgcagacacagcaccgaaaaagaccggaacttatggaaaaagctggacggtcaaaaagacaggggaagacagtaagtccctgcaggtaacggtacattccaaaaaccgataccagatcgctcatctcctggagcatggacatgcaaaaaggggaggcggccgggtagcagcaagaccgcatattgcacctgcagaggagactggaatccgccagcttgaggaagaaatcgagagggggatccggaatggatgatctggttaagatgatggaagaaacaggactgccatttgcctacgaccactttgaagagggcgaagcaccagagccaccgtttgtatgttatcttcttccgcagagtaatcacttttctgcggatgggagggtgtatctgaagattacggaagtccatatcgaactgtataccgactgtaaggacttgtcggcagaacagaaagtggaagccgtgctggataagcatggcattttttatgagaaatccgaggtatggattgaaagcgaaaagctgtatgaagtcctgtattcatttgagatggaggtttagacatgggaaataaagtaaaatataatttgaaaaatgtccatgcggcaaagctgacggaaacggtaagcagcagcggtgaaacgacattttcttatgaaagtccaaaagcgatccccggagcagtcagtatcagtctggatgcggaaggggaatccacaccgttttatgcagacggcatcgtgtatttccgttctgtgacaaataacggatacagtggtgacctggaaattgcactgatcccggagtggttccggacagagatcttacaggagaagctggatggaaaaggtgtgcttgtggaaagtacaaatatcggggaaagcgtgaagttcgccctgttatttgaatttgacggggatgtgaatagtattcgccatgtgatgtataactgtacggcatcccgcccgtccatcgaatccgaaacaaaagaggatacgatcgaacctggaacggagaagctgtcactgacggctgatccgagaagtgacggactggtaaagagccgtaccggagataccacggatgcagcgacatatgcgaactggtataagtccgtatatattccgtcagaaacagaagaaagcagtgcgaaaggataaggtgaaaggatatgttaaaaagagaaattgaaatctgtgggaaaaagatcccgtttcggtcatctgcgaccgttccgagattataccgtgcaaagttcaagagggatatttttaaggatctgtcgaaactggaaaaatcctataagggtaagaccgaggatggggatgagttccagatcgatgacctggagatctttgagaatgttgcatatatcatggcctaccatgcggataacagcatcccggcatccattgatgactggttggaccagtttgatatgttttccatctatgaggtgctgcctcagatcctggaactgtggggcgataaccttgcaacagaggtggcagcaaaaaaaggtctggcagaagtgaacgggaaatgacaacaccgctgttccttctgcgcagcgtagagattggaatatccatatcggatctggatcttttgacagtagggctggtgatcgacatgtggacggaaaaagcaaatgacggcgtgaaatataataagatcgccacgcaggatgattttgataaattctgatagcagcattagaaaaatcatgttattatgctattgtataatttctgtttgaaagaatacagaaattattctccactcctgagaaaataattatgcagggataatccttggaaaatattctatggattcagcttagaaggtgacaaaagtgtccgctatcttctgcaggttatttaatggaatcaggaagaaaggaggataactatggctaagagaaaaggagtatccggtaaaactcatacgaaacagcagcttaatgattatgccaatcagaataatccgaataataaggcataccgggcgagaagaacaaacgaagaaaaagcccgaaaaacaaggaatcactttgaccaggatatgatctattatgagccggatcttggttttggctggtgtgatgactaggatttgagaaaggcaggtatttgtatgggaaactttttttatgacctgtttaatggaaagacgggctatacaatatcggataacatggcagtggatgaagatggtgatcttttaatgaggttatctgatcatacggttatggatatggatacagggaaaattggttttttatcatcggcaggaaatctgtttgatgaggaagatgaatggtaatgtaaacctgatatgacgaatggaaaagcatcgcatttgcggtgcttttcctatacttagaaaattatgtttttatgaaaatgaggcatcgatcatttagttgtgatcggtgctttttttctgccatgacaggggaggtgtgtgcaggtggcaagcaggattaaaggaatcacggtcgagattggaggggataccactggtcttgacaaagccctgaaaaatgtaaatgcaacgatcaggacgacccagtcctcgttgaaggatgtcaataagctgttaaagctggatccggcaaatacagagctgcttgcacagaagcagaaacttttaaaggatgtcatcggttctaccaaagaaaaactggatgctttaaaaacagcacaggaacaggcaaagcagcagctggagaacggggatctgggacaggacaaatatgatgcccttcagagggagatcatcgaaacggaacaggaactccaaaagctggcacaggaagcggtaaattccaatgctgcccttgcgaaaatcgaagaggccggtgggaaactggagtcagtcggaaataagatatccggtgtcggaacaaaaatgcttcccgttacggcggcagttgcaggtcttggtactgtagcagtgaagactacggcagattttgattcttccatgagccaggtacaggccacgatgggaattacggctgattccatgtcaaaggtggatggccagtcagtaaacacaatggataccctgcgtaccctggcgaagcagatgggagagaaaacagccttttctgcaagtgagtgtgcacaggcacttaattaccttgctttggcaggttatgatacacagcagatgtgtgatacgcttccaacggtactgaatctggcagccgcaggagatatcgatcttgcatctgcatcggatatggtaacggatgccatgtcagcccttggcatgcagacggatgaagccaatacaatggtcgatcagatggcaaaaacagcatcgaccacgaacacatccgtggcacagcttggggaaggaatccttaccattggtgcaactgccaaatccgtaaaaggcggtacggcagaattaaatacagcccttggtattctggcaaataatggtatcaagggagcagagggcggtacacatcttagaaacgtgatccttgcattacagagtccgaccgataaggcggctgcctgtatggagagtctcggccttcaggtttatgattcgcagggaaacatgcggagtctgaacgatatcctttctgaccttaataagtctatggatggcatgacctctgcagagaagaataatatcatcagtacgatctttaataaaacggatctgtcatccgtaaattccctgcttgcaaataccggggatacctgggacagccttcagaagtccattacggaatccggtggtgctgcacagcagatggcagatacacagcttgataacctgtccggtcagatcaccatcttaaaatcagcggtggaaggtctggccatttcttttggagaggcgcttatgcctgtgatccggagtcttgtctccaagatacagggatttgtagataagctgaacagcatggatgaatcccagagaaatctgatcatccgtgttgcagcggtggctgcagccatcggaccgttcctgatcattcttggaaaaacgatctcaaccgtaggaacagcgatgaaaggcttttcttcccttgccaaaggaatcgcaagtcttggagtaaaaatcgcaggaagcagcggttcggtaaccgggcttgcaagtgcacttggggcggtagcagggcctgtgctggcggttattgccgtggtggccgttttagtggctgcgtttaaacatctgtgggataccaacgaggaattcagaaatgccatgacagcaatctgggaaggtattgtcaagaaggtacaggcatttgttgaagggatcaaggaaaggctggcagcccttaatattgattttactgcagtggtaaatacactgaaaaaaatctggaatggtttctgcgaactcctggcacctgtgtttgaagcagcattcagtgtcatttcaacggttcttggtacagtacttgatgtattgacgggactgcttgatgtgtttatcggacttttcacaggaaactgggagcagatgtggtcggggattaaggagatattctccggcatctggaatggcatcactggaatctttacggcagcagtgaaccttatccgagggattgcggatacgattcttggatggttcgggacaagctggaatgcagtatggacttccgtatccacattctttacgaatatctggaatggaatcaccgcattctttaacggagtatgggagaccatcaagaatgttgtgcaggtggggattctctttatcggttcgcttttggaagcagcgtttaatatcattacgttgccgttccggttcatatgggagaactgtaaggagatcattatctccgtatggaacacaataaagagcaccgtttcgaccgtgatcaatgccgtggcatcggtaatttctacggtcatgaataccataaagaccgtaatcagcaccatctgggatgcagtcaatacaaagatatctaccgtgctgaatgccattaagacggtagtaactacggtatttaatgcagtaaaaacggtagcggttacggtgtggaatggaatcaaaactgcaatcagcacggttgttgacggcattaaaagtaaagtgtcttccgtatttgagactttgaagagtacgctttcttctatttttaatggaatcaaatcgacagcggtgtctgtgtggaatggaatcaagagtgcaatcgttacaccgattgaggcagcacgggataccattaaaggaatcgtggaaaagatcacggggttctttaatggcatgcacctgtcacttccacatatcaaattaccgcatttcagtatcagcggaagtctgtcacttgccccgccaagtgtaccgcatctgagcatcgactggtacaaagaaggcggtatcatgacgggaccaaccatctttggtatgaatgggtcgagtcttatggcaggaggggaagctggaaaagaagctgtccttccactgaaaggattctatgaacagttggaaaatattctgacaaacaggctaaatacttcggcaatggagcagtatctggctgtgatagcagaaaacagcggaaagggcatctatctggatgacggaacgctgattggaaagctggcacccggaattaaccagaaactgggcatacagaaatttaaggcagaaagggggatggtctgatgaatgaatatacaaccgcaggatttggagctgcgatcaatggaaagcatacgtggaaagattatggtcttgtaatcggaaatacggatatcgtaggagagccatccccgaaaaccaattatatcgaaataccgggaagcagcatcagaatcgatcttacggaaacactgaccggacaggtggaatatgaatccagacagcttaaattctctctgggaaaaatggaaagggaggatgtatggccattgttttaccggacgcttttgaaaacctatcagggaaaagaagtgtgggttgttctggatcaggagccggatgtattttaccacggacgggcagaaatctcaggattttccagaagtggaaggctcggcacatttaccctgacggtggatgcggacgcatataaacaggaacttaatgtatcgaccgaggactggatgtgggatgcattgaattttgaaaccggaatcatccgtgattaccgtggaatcagcgtctctggcagcagcagtaaacttctggaaggaagcggtatccctgttgtgccagtattttacgtcaataatcttgatgagagtgcgtcaaactacattacttttaatggaacgagatacaccctgcagcagggcagaaaccgctttgcagatctggtcattccggtcagcggaggcagactttatttttacgggacatatacagtgagtattgagttccggggagggagtctgtaaatgtataaagtattttgtgacgatcagcttttgtatcttccaggagatcaggagctggtcatttttaataccaaactggaactggcggataataaatccggttcatttgagtttgatatcccggcagtgaatccgatgtatgacaagatgaaaaagctgacttctgtcatccgggtggaaaaagacggggatagtatcttctacggacgcatcctcagtatggagaagaatttttataatacccagacagtggtgtgtgaaggggagcttgcatatcttctggattcaatacaggaaccgaaggcataccacagctatactgtgcgtagtttcttgaacgcattgcttgctgtccataatatgcagacaacgatggaaaaacgtcttgctgtcacatttaattccaaatgtgcaggagaaagcggttcttttgataacctctccctcttctataagtctggaagtacggtatatgccgtttttgcaaagaaaagggctaatgatgtggcagggaaaacatttattgtacctgcaggagatttttatgtgtactggcatacggatgcatcggttaataactattatggattttccatagacagtgtggagtttacaagtggaattccaggtacggcaacggtatcatcacttccatcttatacggcagtggaaacgaagaaagtttctgatatgcagagtgcccataatccatatgctaatagttccaattttctgtggcattacacccatacattcgacaggaaagacctgtatccgaaaatgtttgttactgggatggtgacggtggaagatagcaatgacagcatctaccgctacacaaactgggaaaatacgctggatgatattcaggataagctggtagatcgtcttggcggacatttacggatccggcattctggtacaacccgttatctggattatatagcagactatgataataccaatacacaggtcattgaatttggcagcaatttgcttgattatacggaaaatgcggatgcatctgagattgcaaccagggtgatcccgcttgggaaaaggttagaggaaagttcgattgaaggactggaagagtataccacgattaaaagtgtgaataatggtgtcccgtatatagaatccacggatgccgtaaaagtgtacggtgtggtgacaaggactgtgagttttgaggatgtcggagagccggccaatttgaagaagaaagcagagaaatatctgtcagatattcagtttgagaatctgtctttgacctgcaatgccgtggacctgaacatggtggatgtggatattgaacgggtcaagctgggggattccatccgggtcgtgtcaaaaccgcatggaatggaccggtattttccggttactgcacttaccattgatcttcagaacccgcagaataatacggtgacgcttggaacaagtgtaaggacaggaatttcagagcggacaacgaatcagaacgattcgcttgtgcagaaaatccaatcactgccgccacagtctgataccctgcggatggcgatagaaaatgccacagccctgattacggcagcaactacaggacatgtggtgacaagaccggaagagatcctgatcatggataccgcagataagaatactgctaaaaaggtgtggagatggaatttaaatggtcttggatattccagtacgggatataacgggacatttggaacagccattacgatggatggaaaaatcgtaggaaaatatattgccgccagaagtatttatgcagattcttttattgctggggaactgcagactgcatggaatggaatcacggattatatccagttaaagaacggagaactgcaggtgttcaatacttctgatcagttggtatcgaagttcaattataatggagagcatttttacaggggtggaacttatgtgggaaaaatcggtacaaaccaatggtcaggtaatgcagcacataaggggctggtgtttgatctggaatataccggaaagtatatggcatggtgttatcagaaaacaagcggagcttcatcctataccacgatgctgtgtttttcacagggaaacagtatctacacggaacaggggctgcatctgggctgtgatttttatggggagtggaatacgctctacaacattaaactttcgggtgtttcttctggcggatacagtgcatttactggaacgatcccaatcatcatgaatattacggataaaggaaatggggcaatcagttggacttacagtaagcttcaggtaaaaaacggcatcatagtcggatactggaattaaggaggtataaagtggaaaaagaaatcgaactggaacttccccgtggggaaaagccaaaggaaggaaaaacagaaatggaagaaaaaacagtggaactgatgtctggctcaccgcttgaaatgaagctagtatagaataaattaaatttctactatatattttgaggataatgtatggtaaaatagtgttatctaagaaaggatgaacactatgagaaaaacatatcttcctctgtcagatgaagacagagattaccttaaagcattatccaaaaagagaaccattcaggcacaagttgtggaccgtgccagaatccttttatataaagccgatggaatgacattccagcaaattgctgataaacttgccattagtaccgcaacggtacgcctttgtatttcgaagtttcagaaaggcggtttagatgctgcactgtttgatgttcagcgtcctggacgtccatcggaaatcactgatgatgcaaaagcatggatgattcatattgcgtgtcagagaccgacagaactcggttatgcacaggaattgtggacgttgacctctctccacaaatacattcagaaacatgcagaagaagcgggatatccaaggctttcaaccgttaccaaaccgtatatccagaaatttcttaaggaacaggatatgaaaccctttaaaatcaaatattactgtgaaaaacgggatcctgattttgaatcaaaaatgcatgaggttctgttggtttataagcagattgaaatgcagtttgatgaaaatggtgatctcattgttccagacgattataaactgacgattacggtatcgtatgatgagaagccgggcattcaggcaatctccaatacggtaccggatttacgcccgacatcagaacatggggaagtatatcgtgatgcagaatacaaacgtctgggaacgctctctttactggctggcattgatttactcactggagaagcaattccgttagtaagtgagacccataagagttctgattttattgagtttttaaagatactggacaaaaaatatccatcacaggataccattcggatcatcctggataatcattctgcacatacttccaaagaaacacggcgctttctggatactatgccaaagggacgttttaaatttgtgtttacaccaaaacatggctcatggttaaacatgattgaaagcttcttcagcaagatgaccagacagatgcttcgaggaattcgtgtcaataccaaacaggagttggaagaacgaatttacaagtactttgacgaagtgaaccgtgaacccgtggtttatcactggaagtataaaatggatgaaatcagtgaagaggaagcagtatcaatttaatatagcaattatttaatattcgttatactagaagaagttttaggtaaggttactgctatggaatcagctatgacaaaaatgacagcattgtttgagggaggtgcatttagtggaaaagcaggaaaagaataaaacagaacagaatcccatgcctcttggcatgattctggatcatgcaagggaggacatgacaaaatcagtggttgcactgcaacagaaatacgggcttccggcaagtcttcttgatgtgatcctgacaggcgtgctgtcagaagtacgggaaatgaagtgtatggagtacaggcagctgaaggagggagaaaaagatggcaaatgtcacaacgtatctgaataagatcctgtctgcggtatatggaaaagatgtcagacagagtatttatgattccatcaatgcaatcaatacacaggtggaagggtatgtatctgctgagaaaagccgtgtgacagcggaagctaatagaaatagtgctgaaaaaatcagggtatcaaacgagaacgatagggaagccgctgaagaggaacgtttaacaaatgaagcagaaaggctggagatatatgatgatctgtgctctcaggtagctgatatgctggatgaattgaagaatgtggcagaggggaaaattacattttctgcgatttatcctgtgggcagcatttatatgtccgtgaataataccagtccggcatccttgtttggcggcacatggcagtcatggggaagcggacgtgttcccattggggtgaatacatcggattcagaattttctacggtggaaaaaacgggtggaagcaaatatttgcagagccatacgcatacctttaccggaacggcggtcacagtaacaggaggagcgcattcccatacgcttccataccctgttccagcagcacccaataatgattcagagggagaatcatataatgctgcttatggaaattatagtccacagagcgaactggtagaggaaacggattcgacagcccacagtcatacctttacggcaaaaggtacgcttagttcagctggatctggaaacggtcagaacctcccgccttatatcacctgttatatgtggaagcgcattgcataattttagtaactggtatctcttcggaggtgctttttttatacccaaaaatcaaaggaggaactcattatgaaggaattttggaacacggtacagtttgtttttacagcagtaggaggatggctaggatatttccttggcggatgcgatggtctgatctatgcactgcttgcattcgttgtgatcgattatctcacgggagtgatgtgtgcggtcagcgataggaagttatccagtgcagtaggcttccgtggaatctgcagaaaggtcctgatctttctgcttgtcggaattgcaaacatcctggatgtgcaggtgatcggtacgggcagtgtgttacggacagcggtggtcttcttctatctttccaatgaaggcgtgagcctgttggaaaatgcatcgcatctgggacttcctgtgccggaaaaaatcaaggaggttttggagcagctccatgaccatgcagagaaaggagaataaccgctatgaacaagaaagaatttatcacagcggttgcaggatatgtggacaagtatgcttcagcgtatggcattcttgtccattcttctgttattgcacaggcaattttggaatccggctgggggaaaagcaccctggctgcgaaatatcataactattttggattgaaatgcggaacaaagtggaatggtggttcagtcaatctttcaactaaagaagaatacacacccggaacactgacgtcaatccgtgacaacttccgtacctattcttcgatggaagaaggagtaaagggatatttcgaatttatccagctttccagatatcagaacctgaaaggcattacggatccaaggaagtacctggaaactatcagggaagacagttttgcgaccagttctgattatgtgaagaactgtatggctctggtagagcagtatgagctgagaaaatatgacaatgcaaaggagcgagagactatggcaaaaacagcagcaacattgattgcacaggcaaaggcatgggtcggatgccgtgaggcagacggatcctataaaaagatcattgatacttataatgtacacagaccattggcaagaaattattcggtaaaatataccgatgcgtggtgtgccacgtttgtatcagcatgtgccattaagacaggtatgacggatattatcccgacagagtgcggatgcggtcagatgatcgccctgttccagaagctgggggaatgggacgaaaatgatgcaagagttccaagaccgggggatattgttttttatgactgggatgattccggtaaaggtgataacaccggatggccggatcatgtcggaattgtagaaaaggtatccggcagtacgattacagtaatcgaaggaaataaaggaaatgcagtaggaaggagaaccctgcaggtaaatggaaaatatatccgtggatatggagtaccgaaatacaacagtggatcttcacagaatacttcttctgggaatgctggtgggagcagcagttctggtggtatcaataaaacaccgaaatgggtagggaaggttacggcttcatccttaaatgtccgcaaatgggcaggaaaggaatatggccggatcaaatcttatccatatctatacagagggaatctggtagatgtctgtgataccgtaaaggcgtcagacggaaaagcgtggtattatatccgcattgcaggaaaatactatggatttgtttcttcagattatatcgtgaaggcataggaatatggctgatggtcagtaatggctgttagccgtatttttttcagtttatgccaaggaaagaaaggtgaaaggtattcaagaaaacacttgctattattggctttcagagtgatatatagactaccaaaacggaaggaggtatggcttgtggaaattcagatcagggaaggcagcagggagcagaaaagaaagttaaaagtctgtgcatactgtcgtgtatcgacagatgcggatgaacaggaaaattcgctggaaaatcaggtcaggcattatgagacggtcataaaagccaatccgaattatgaatatgccggagtttacagtgattttgccatatcgggatttaaagaaaagagacccggtctgcagaagatgcttgccgatgcagaaaaaggtaagatagaccttatattaacaaaatcagtatcacgttttgcaagaaacacctcaatcgttctggaagctacacgaaagctgaaggaactgaatgtaggtgttttttttgaactccagaatatcaataccctgtcaggggaaggggagctgatgcttacgatccttgcagcattcgcacaggcagaaagtgaaagcggaagtgctggtgcaaagatggtttatcagagaaagtatgaggcaggtattcccgtacagtaccttgagcggtctttcggttatacaaaagacgagagaggagtatttgttgctgacgaagctgaagctgtatgggtaagaaaaatctatgagatggcagcagacggatatactcctgcatcaatcaaacgatacttgaatgaaaacgaagtaaaaacggtaggcggtgtacagtgggtagacagcaccgtgtttcgtcttcttgaaaatgagatttacaaaggcgattacatcatgcataagcacttcgtgaatgaagagagaaaactggtcaggaacaggggagaagtggatgcatggtacatcgaggatgaccatgaagctattgtttcccctgaactctggcagaaagcacaggatgcattggctgcaaagcgggattatcttgcggaaggctcagtgatcgaggagttcacggaagaaaattatccttacatgaataaaatctattgtgctaaatgcggatatcccctttacaaacgaatctacagcaaaggcaacagacttaactgggggtgcagtggaacaaaaagatatggaaagaccttctgtgatggcattaatatcccggatggtgtgctccggagtgcgtggcattttaaagaaaacatatatattgctgagaaagcatcggataagggagtgaaggaatttacttatttaaaagagcagtcatggaaaagaaggcataaaaagaagcagccgccagcaattccagaaaatactgaagcagagtatccttacagagagaagatattctgtgcattatgtggaagcagacttgtaagatatgtaaatccccagagtcataaagtcacgtgggtatgcagcaggagaaagcggaaaggaaaagatgcctgcgatgggaccagggttccggacaccatcataaagggatggggagagatcaaaaaagatatttatattcagagaaaggatgataagaatggcaagaagcgttacagttataccagcaagaagccagaaggtgcggacagggcataaggcggtacaggaaaagaagataagggtggcagcctactgccgtgtgtcaacagaccaggaagaccagctccatagttttgaggcacaggtcgagtattatacaaaatatatcaatgagcatgagaattatgaaatggccggtatttatgcagatgaggggatctcgggtacaaatacaaagaaaagggaacagttcaaaaagatgatcgcagactgcgagggaggtaagatagaccttgtcataacaaaatccatcagccgttttgcgaggaacacgcaggactgcctagcatattccagaaaattaaagaatttagggatcggcatcatatttgagaaggaaaacatcaacacactggattctacgggcgagcttctgttcaccatcctaagctcccttgcacaggatgaatcaaggaatatttcagagaactgtaaatggggcatccgcacgaaattcaagaacggtgaaatgcatcttaacacattcaagttcctcggatatgataaggatgagaacgggaagcttgtcatcaataaggaacaggcaaagacagtgagaaggatatacagggacttccttatcggaatcaatccggcacagatcgcaaaggaactgacggaagagaaagttcctgggtgtctcgggcagacaaagtggtatccaagcactgtcatagggatcttaaaacaggaaaagcacatgggtgacgcacttctgcagaagacctatacggcagatttccttaccaagagacaggtcaaaaacaacggtgagatcgcacaggtctatgtaaaggacagccataagggaatcattgataaggaaacatggaatgcggttcaggaagaatttgaacgcagggagaaattcatgcagaagcatgggacagaccgctacagttacggttcagaatgttatcccttctgcgaaaagatcttctgtggggaatgtggaagcctttttacaagacattcatggaaatcaagggggatcatacaatggcagtgcaagaatcaccgtaaggatggaaaagttgcatgcaccaatgcttatgtagataatgcagatttggaaaagggatttgtaaaggcattcaaccgattggtcggtgaacgggaaaagcatatagaaagatggaattccatgaaattagatgggactccgcttgagaagataagggcggggcagatgatggaagcaaccgaaagcggacagcttcagcagtatgttcctgaagccgcacagcttgttttggaagaaataacaatattcggtgcaaagaaatatgagtttgcattcttggaaggcagcagggtaaaggtttccgtatgatcattcggaaacctcctcctcatcacccaagccaaataagtcaagctgcccgttctgcggcatatcatcagtttcttcttccagttctggttcatcagctttcttctgtgggagtttatgcgtgtagagcttatcccacggaagcggattccggcattttttgttatatccgataaggattgcctctgcaaatccaagagagccggaacgcctgtccttggcagtacgtgccaattccttgatggatattcttcccagtttttctttgaaaatatcatctttgaccgcatcgccataggcatttagaaaacgtgctagtccattcatcatgtttgcactgaaggactgggcagcaccttcccatgttgcgacaatcagacggatcacatgatcgagcatgtgataaccgtatttgtcgtggatggtctcaagggtagcaacggcacagataccgccaggaacagaagaagaggtgatggaaaggtcataagattctactagatcacggatgataagctgtttatcattcccagcctcaatgtttgccatgaatatttcatagggaagcaggggctttacatacttcatctgattagcaaaaatatcggcttcgtgttcgtaaacgaggtcatcatagaccatgcaccatacaggagtctctcttgaaccggagacgagtgccacgatttcaatggtgtgctgcccgttaaagacatagttgataccgttacggcggctgacttttacgggatttatctggtacagatcgaagttcgcagcggcacgctggacatgattctgtgaaagatttctctgatattcttggttggatacaagattcctgatgggaatctgctcaaagtgtacttttggaacatactgcatgagatcagtttgttccgatattgcttggtcatctgtcattttaatcctcctccaactgcgtcagcagtctgtttatttttcgtgtaaggtttatgatctgtgtcctgacttcttgccgggcagaagcggatgtggaaggaaaatccgtaagttccattgtccttgatatggttttggaccatgaaggaatggtaaatttaaggcttgccagttctgcatctgggtcaatgacgggcatctgtttgatgccagcctcggcactttccctttcacgtctgcgccttcgggaatccggttttcctgtaggaagccgctgccatcgcagttcatgccgtaactgcgagtagccgatgcggtcgatcgaaccgctgttgagcagtcttttaagtccattgatatcttcgatgggaagtcttgacagctctatgacattttcatgggatacacggagactgccgtttaatattctggatgttatttccggtccttttatgcggagttcgtcgagtgctcttgcgtacacatcgtattttgtaacagtggaaaagccgaagttatattcttttccgataatggttgcaatctccgttttctgtacatacttctgggatatctgtccgtctgcgttgagctgtttctctggatgatttttcagaaaatcagcactggcaatattcatgtctgcccggaagcgcctgccaataagatattttttgtattcgcttgtgaggtccttccgtttaagctgctctgtacatatgtaggcttccgcttcgtcacggctctggaagaagagtctgcgtatattgaagtggatatcccacttccggcagatggaataacggagatgtccatcgatgaggatgtttccccagacacatatagcttcatcacagccatgatcgaagatatcttcttcgagatcttctatatatttttctactcttggttggatgagctgcagaaattcagcatcggtttcaaaatctggaatctgatgattactcatacgatttcacctattctgacagattcatccacgaggatacattcctgcatggaaaagcttgccagtccttcttttttatttattgcaccatagatgcggtaggatctgttattggaaagttccgcattggtctgttttaaagtctggagcagttcacggctgtataattcgtaactgtttcgaatgtcggaatagcatgccctgacatggtgggcaaggtaatcctgacggacgcttttcctgacggcaatcatatgggtgtcgggatttaccagaagctggatatattctggatcaccgagcatatgaagagtatgtttgtgtattcggatgcggtttttctttaagtcaatgcataggattggctgtgaagagggatgattgctcatagtgtgtttcctccttttgtggttcggctggatttttgggttcttctggcggtgtgttctctgaaattccaaagacagcatagccgtcaaacatattgatctgtaagttgctctggtgttcctcaatcggcacaccgaattggttctgccattccgctggatatgtaggtgtccgggatgtctttatctttccatcgtcttttgctgtacgcacatatatttcgggcgtggtaaggtcaaagacgaataagagttcattatcagaccgtatcagtttgccgagcagtttataacggtaactggaattccatcccatcaaggttattaccttggcaaaaaagatccggcatgtgatttgccttggggaacgcttctttgtagcagagcaccatcggaaggagtctttttcatcttcctggcatgggcggacggcaagttttttttcatctgggttcacaaggatctgtacaaaatctgtcttaggcagctttttgatgcatgcagtatttacggatactttgttggcattaaatgtaaaggatggttcataggtgtgggcgaagaattctccacgcactacctgataaccctcatagctgaaggcatcgtcctcgatgatctgtaagtcccttgaagaggactggattaaggtttcattgtttggctgttcattcattacggttctccttcatgtcagacatgagttgttctatgcttttttctacttcatcaggactggtcacctgtatgtctgaatctttgtatgcaactgcttcgttggaaagggtgttctggtcattgaatctggcaaattcctgtgcctgtgcatggcagtagtagttgctgccgaaagtgtcagcccagtcaggcggataggcacggacattttttttgagattgtcagtaaatggttttacgtccgttggtgcatctggtagctgctgttcatcgatcacatcatttggaataaaaatttcagtttcttccagattgaagataaggacagcatccgatccgtttccacgcttgattcctgttatgcggtatctgcagtctgcgttccaaccgagaagtgcatagatggtaggcataaaagctgtaccgctgattgcccttggggtagaaatattccctcgcttttttgcccactgcatggcgtttcgatgcgtttgtgggacaatccttacggcaaagagatgtttgttcggatggatcagaagttctaccagtgtgctgtttagttttctaacggcagtggttgaaaatttaatatcattcagactgaatgtcacgataatgcgatcagtgctgtcaaaaaactgtgagcgtgcaatttcataaccacgcaggtcaaagtccccagactgcactttcacgggtgacgagggtgggagaaactgttctgtaccgccatatacacttagggaagcattgatataatcatcctctttaaagccggcccatcgtggattaatggatacaaagcctttcaatactccatctggcaggacctttaactccggcagtattcccttatttccatacttggcattgctgatgagccgttgtacggcaatgaaatcgtcacgggacacaattgcttcatggtgattacgtttcctgtattgcgggcggttctgcatgttcttttttgatttgtgattcaggtaatttggagtataagtctttcgggcaagaacatcaccgcagtgtcgttcattctgcaatatctgaaggattgagccgggagaccatacggtattcccttttttagtttcacactccagttccgtcagggtatcagcgatttcctgacaggtgcagccgtttaagtacatcataaatatgagacgtacaatctttgcttccgcttcattgattacaaggtttccatcttcatcatggtcatagccgagaagcgtgggagtgaggaatatcccccttcgaaaccgcatctcaatggaagcattcataatctcactcttggtatggctttcttcctgtgcgagggtagccatgaaggaaagtaccatttcgcttttcggatcaaaggtattcaatcgctctgtctcgaaaaagacaccgaccggatgcgggagagccagcagttcacggacatatccgatgcagtctacaacattcctggcgaaacgggacacgctctttgtaacgataagatcgatttctccttttttacagtcttcaatcatctgtttgaactgatcacgatgctgcagagaagtgccggatatgccttcatccgcatagatctgtacaagtttccaattcggacttttgctgatgacatcgtggtagtggtttttctgtaactcataagaagatgtctgtcttggatcgtctgtggatactcttgcgtagacggctacccgctgttcattttcaacagcgaatatatcttcctgtggaagtgccggaattacatcaagttcatcaatgctgactcctttatatcgttccctgattttgtttttctgatccgcaatggagccggatttctgttcgttttctctcatgtcttaccacctttttcttatgatgtggtttattataaaattttcataagaaaataaaatagaccatacggacaggcatatccgcatagtctattccaaagcaattttttatgtgtgaaaatagtgtgccgcagcatctatgcttcgtcagccgaaatatgccatccgtttttatgcatgctatcaatgcttgcttttaccatttcataaatgaagcgtttctcattttctgtgcattcagccatcagcagatctaggtcagtttggtaagcggtagggttgtggagctgtactccagcgagcagctcatcgaccgttattcccagggcatttacaatccggataatggactcaagactggccttacgtttggcattttcaatatggcttatgtaggagatggagagttccgtttcctctgcaagctgtgcctgtgaaaaattgttctgttccctgacttccttaatgcggtatccgatctgcttgtgatttacagatgcaagtgattcgttcataatgttacctcctgtttcttttccttacgcaaatagattatccgtcagcgagtgataaaaagttatgtaatttaataaagtagagtggagtattgctgaataacgaggtgtcaatatatgtagatatttgtcgaacgattttgattgatgggcgtgcgaattgttcgctaacgaaacactccagagatggaaacaagttagcggagcaaggaaatgaaatattggaatacagttggtacaaaagtggtcagaacccacctgctggaaaagatagagtaatgaacttgtttaactattagtttgatatagagtggtgaaattccacttgaggaataaatgtcgatattcctaccctgagactccgatatgctgtttagccttaacgctaaatggtataaagctcggtaaagtcggctgaaaagaaacctacatggatgaaatatataagtaaaattggtacaaaagtggttagaacccgcctgtttgaaagtatagagtaagaagtatggtgacgaagtaagtcgggggtccttaagatgaataatctttaaaaaataatatgcttactcaccgggaactgtcgtatgaaaggctcgtaatttaagaccccattgaaaaatgggttgtccctatcgggaaactaatcgtagtagtattattgtccattgagactactatttttatcgcacagacgatattagttctgattccattcgactaaaggaagaaagaacggttagcgggttaaagacagaagctaagttattataataaaggataaaactaatggaacaattgaaccttgaaagaaaatgttaaggcagttaagtgccaatgattctaataagtaggaaatgacttatgaattcaaggggcagcagcccgtagtaccaatgaaggtggtgataagccattggagggaaggggcatagtcgtaaatagaatattgtaagaatagtttaattgctaaggtagccgctgagcgaaacgaactaaccaatataaagtgtcacggaggtgatgctgttggggacaaaacttaacaaggttccgtcaaatgaagcagaacttaacaaactcttacaagacatttatttgaagacaaaggaaaactatgaaagtgatataaaaagcaactttacaggtattcttgaaattatagcatcagaagctaatataattacatcaatccataaaatcaaagccaacaaaggtagtcatactgctggtatagatgagaaggaaattgatgattacttaaataagggatttgatgaagttatagaaattgtgagagcaaaattatatgactacaatcctagtatggtgcgaagagtatggatacctaaacctggtaagtctgaaaaaagaccacttggaattccaacgattattgataggataattcaagaatgtgtgagaaacatcattgagccaattgcagaagcccagttctttgaacattcatatggcttcagaccaatgaggtcagctgatatggcgatagcaagaatcaaacacataaacttccatgctaaatgttattgggtcgttgaaggagatataaaaggcttctttgacaatatagaccacaatacaatgataaacagcttatggaatcttggtatcagagataagcgagtgcttagtatcattaagcaaatgctaaaagctggtgtaatggatgaatgtagtaaaagtgaattaggaaccccacaaggaggaataatatcaccactacttgcaaacatctacctaaaccgattcgataattttatgacaggtgattttgaaaggaaaaaacttaaaaaaccgcattccagaagagatggtgaaatatcagcaatgagaaagcacagcaatctcaaaacctgctattatgtcagatatgcagatgactgggttattctaacggatagccaagaggatgcagaaagactaaagtttaaagcaaagaagtatctacatgatactttgaagcttgacttatctgaggaaaagacattaattaccaacgtctgtagtaaacccattaagttcctaggggtagaaatccgaatggtaaagaaaaatgggaaatgggttaataaagtttcacctgaaagtgaaagattcaaaaggaagatgaaggatttaagtcgtgaaatattttatatcaggaaaacatcgactttggatgctgatagacttattgagaacatcaaccgagtaaattcaatcattgtaggactcatcaattattatagtatgtgcgaccaaattagtgtagtgattcgaaaatatgcctggttgttaaaatatacagcctataagtcacttaaacgatatggaggtcaatggattagagccaacgaagtttcaaatcttattggactgcactatgggcataaagccaacatacctgcaatcaaatataaagatatgtatataggagtcactgatataaattttgcaaaatgggataacccaagatgtaaaaatcaaaatgaaacaccatatacacccgaaggtagggagctttataacaagaggatgagaaaaaagggattaaaagtgcgaacggatgaagttaattcgacaacacacgcattctatataagaatgagtaaaaatccactatataactttgaatactttatgaatagaccatacacatacaacagagacaaggggaaatgtaagatttgcggaggatatattgaaccaaacgaagcaagatttcaccatgttgataagaagttgcctatgaaccaaatgaacaaagtgaagaatttaatcacagttcaccaatattgtcacgatttaattcatagtaatacagagtcaacaagtctgtcagaaaaaacactaaaaaatattgaaaaatatcgcaacaaatttaacggttaatatctgacaatattcgaaagtagtttaccgaagactactatttacgatggaacgctgtgtgcggtgaaagtcgcacgcacagtgtgaaggaggggaaaaggacaccaaacaggtaatgctgaggttgttccttacctattcctatggtataaaagatgctatgctgatgttggaactgataatatggaagtgaaagaaacaaggaaaaacaaggaattataagaaatacatattgaactgcggtgtgctgctgttcatatttttttacccttatagtaaagtacaatggagtaaattactgaagagatatggctctaatatttattctggtttgcggttaaaataaatgtatcgcagagcagaagagaggtgtaatttacttgcgtacagaggactatatcccgaaaagggtaaaagaattatgcagcaagcataaggtttccaagtaccgactcgcacagctcactgatatgtcacagaccgctttagggaatataatcaagaaagagagcattccaacgataccgactttggaaagaatctgtgatgcattcggaatttcactagcacagttttttgccggggacggcatgagaccagatctgacagacgagcaggaagagatattggaaacatgggataacctaaatgctgatgagcggagaattttaatgaacttcgtgagatctttgaagaaataggggaagcagttcaattgtatctgattgattgtttcccctttttctatgcgctttccacggcagaagaaagcagtgaggatacagaatgagtgtaaaagatgaggagttcaaaacaaaaatctacgatctgatgaatggaagctacaatcttgaggaatatccagttgcagaaagcagcctggtaaaagacgaatttgcagaaggggaatactgtgaaaaattatattcgcagatgctggaagcctatgagagggtatgcagaagacttggaaagccaggcacagaagatgaagatgtggagattatcatatcgaacctcatgagcataggcagacatcagagcatgaagatgtttgactatggggtgctttttacagaaagagaaaataaacagtaatgtgactgtagaatggtgtggctgtgattggatggctgcaccattttttgatataataaaagtgatttgaagtagttgaaactatatgagcatagaagtataaaagaaaaacagcttaagctcaaatacatttaaaaattatgggagaacattatgataacttttgatttctttaacgatagttcaacagaacttgtagaaaaattctgtgagtactttcagttagacaaggaaacggttgaggactattttatcagggtcaatcctgatacattaacaccagaaacattggtgagaaagtttgatttaaaattaaatgaatatgatagcagtcaattacaaatagtgtgtcgtcatatgacaacatctacagaagatgaaatccattcctttgtggataaagggattcttgatctaagaaccatgcttcaagagaatacccctttatctcaatttttgttagaacacaaaattaaagtggatgttgatgagcataaaatagaaattaaagggaaaaattatccgatattgagtgatcatgaaatctgtccagaatgctacaatggcagagaacgtatttgtacaggatattcaaggtgtgaaagctttaaaaaaatcacctatcttgcgaccaaattatattattatgatgcaactgtggagtgttttattcatgcaacactagatgagatgaaaaggtattcgaccattgataggtgtccagaaatattgaatacgttagatgatgtgcgttcagcagtaaatgggcagtattctcctacatacaatttatgctatgattggatggcaaaaaagaagaattgttatgttatagagtatgctagtcgttggtcggaaatggaaacttttgcgccaataaattatagagatgcttatcgagattatgaaagtcttttatattcttgcggctttgatttcactgattatatggaagaaaccataccgaaaaaagtatatgataatatcacttttttgagaagatttatatccatctatttttataatgcagaagaatatgggtcattgcttgctggaaattcagtgccacctgaagcactaaaagtgcttgaagtgaaagaaaatgatttggtagaggtcgctttgtctaagtagctttaaatgttaagaataacaatgtgtataaaaacaattctgcgaaattatacaaatctgaaaactatgtgattttcaagctatccccgggagcatatcccataggggatagtccccctaagccgtgagggctaggtatctcttttaataagaagttacgccatctataaatgacaggggaaaaacccagacgggtttgcatatcagccttcttgccctggcagtcgccgggattctccgacggctgggttttcccatgccggtttgggtgatactttctgttggtgtgctggcggggtacggcatcctgatcggacagcccaccacagcggtacgggctttactgatgttttttgtacttcagggtgcaagaattctcgggcgttcctacgatctgctgtctgcgctggcgtttgccgggattctgatgctcctggataacccggatctgatattggatggtgggtgcagactgtctttttgtgctgtgatcggtgtggggtggtatgtcagtgaaaagaataaaatctttcggagcatcggggagaaagaaaaaagaaagaacagagggaaaggaggaaaagggagcagtgccggagcaatactggaaaacatacgggccggctggtatctgtggctttttactcttccggtaatgctggatactttttatcaggtgtcagtggtggggatattgtggaaccttgtggcgattcccttacttccggtaatcattgcttccgggggattaggagtggttctggcaggatggaatatatttctgggaagtcttgcgggaagtccggcctatggaatgttgcagctatatcaggaaatcgggaacatatccgagaagctgccggttggtatgtggactccgggtcaaccgtcaaaaccggtgattgcagggtattatctggtgatttttctgctggttttagtggaaaaacagctgataaaaagagaaaaacggtggaaaatccggaaaatatttccgggaatggaactatgcagtatgttacttctgcttttgctgatggcacatccctggcagcagagagaaaagattacatttctggatgtgggacagggagatgccagcctgttacagagcggcggacagacacttttgcttgacgggggaagtaccagtcagaaaaatgtgggaacttatgtgattcttccatacataaagcagcagggaatatcctgtctggaagcagtagttctcactcatacagatcaggatcatatcaatggcgtaacagaagtactggaggaaggaaaaaaaggctggctgacagtaaaaaatcttatgtatccatactggatggaagggacggaacagggaaaacaactgaaaaagctggcagaagaagcgggagcctcctgtaggaagatccgggcaggagaccggttgacaatcggaaaggcagaagccgtggttctttacccgaaagaacaggaaaagattgcagaaccaaatgcgggttcgctggtacttttctggaaatgggagggagtccgggcgatgtttaccggagatcttccggaggagaaagagagggaattgctgcagaatctgcctgcctgcgagatcctgcaggtaggacatcacggttcagctacatccacctgccgggagtttctggaacaggtacaaccgtcgttagcggtaatttcctgtgcaatgaaaaacaggtacggacatccgtcaccggatacggtagatcggttaaaaaaaaccggatgtgagatccggtatacgatgaagagtggtgcgattacgataaggaagagggggagggaggttctggtaacagaatatctagagcatgttgcagggcacggagtgaacagtaactgagcagtaaccattccggagttttactgatgatgccggttgctgaaacaggaaaaaaacagtataataaatccagatgaggaaaattgggtgaaaggttagaagatttgatgaaaagtgtattggaagatataaaaaatcaggagtataagcaggcatatctctttttcggggaagaaggttatctgaaaaaacagtatcgcaacaagttgcttcaggcatggaatccggatggagatacgatgaatgaatccagattcgaaggaaagggaattgatgtgaaagaagtaatctcacttggagaaaccatgccgtttttttctgatcgacggatcattttgctggagaataccggatttttcaaaaatcagtgcccggaactggcagaatatctgaacaatcttccggattatctgtatcttctgtttgttgaagaagaggtggataagcgaagcaaaatgtttaaaacagtcaagcagatcggcagggtggtggattttgcggtgcaggatgagaaaacactgatgcgctgggtgcttggtatcatgaaacgggagggaaaacagatcactcagagagatatggagcattttctgtcgaaaaccggtacggatatgagtaatatcgaaaaagaactggaaaaactgttatgttataccatggatcgatcggtgatcacaggggaagatatcgatgcggtatgtactacgcagatcaataaccggatctttgcgatggtacaggcggtggcagagcagaaccagaagaaagcgttggatctgtattatgatcttctggcgctgaaggagccgccgatgaggattctttttttgctggcaagacagtttaatcttctgttacaggtgaaagaactgcagcggcttggatgcgatcagaaaacgattgcatcaaggaccggactgcagagtttcgtggttcgaaattataccggctgtaccggaagatacacaacagctcagcttcgtcaggcggtggaagattttactcagacagaggaagaggtgaaaaccggaaggctgagcgatgtgctgagtgtggaacttctaattgtaaaatatgcgcggaagaatccggcgtaatcaaaaatcccgggagctgtctgaaatggacagtttccgggattttcgaatacctgcagaagttaccactggcagtttccttcggatacagagcaacaaaaaagaacagtcactgacgggatgactgttctttttaaattccttatttattctatcaattagaattaagcaatagagttaactgctttggatacgcgggaaacttttcttgctgcgttgtttttgtggtatacacctttagagcaagcactttcgattgtagcggtagctactttcagagctgcctgagctgctgccagatcttttgctgcaactgctgcttctacttttttgatagatgttttaacttcagaacggatagctttatttctttcagcttttgttctgtttacgataactctttttttagcggatttaatgtttgccattttccataacctccaataaattattcaatcatttatcatattcatcagcccagacacggacaggctaatctcaaaatacccatacagtttatgccatttatcgtggtttgtcaatggtttttccgaaaaaaaggcattttggaatgtattttgaaccagttattgtgaacggagcgaacagtaatgattttcagggataaatcgaaaggaaaagggaaatctaaaaggagaaaagaacgcaggcaggaaaaggtgttcagaaaggaaaggtgacaacgatgtccgggaattttgggatacgaacggatcttgcagtggagagtaaggagaagtatgagaagaacaatgtggagattaagggtgtggcgattcaggagaaatatgaggaggctctggacctgaatacaacggtggtgcggattcagacggagcagggagcgaaagcgatggaaaagccgaaaggtacgtatattaccatggaagccccgaatctgatcgtgccggatgaggattatcaccgggggatttcccgggcacttgcgcaccatctgaaagaacttcttcatctggaaaaagagaaatccattctggtggtgggactgggcaaccgggagatcacaccggatgcactgggaccacaggtgattcagaatctgaagatcaccagacacattattaaagaatatggaaaggcaggtatgggaaagagaaaagcacatcagatcagcagtctggttcccggtgttatggcacagacagggatggaaacaatggagattatccgtggtgtgatacgggagacggatccggatgcagtgatcgccatcgatgcactggcggcacgcagtgtacggagattaaactgtacgattcagataacggatacgggaatcaatccgggatccggtgtctgtaatcacagatgcggattgaatgaagaaacacttgggataccggtgatcggtatcggtgtgccgactgtagtagacggcgccacgattgttcatgatgccatcgctcatctgctggaaaatctggaagaggcggagatggaagagtttttgcaggaactgatcacgccgcggctgcacagaatgtttgttacgcccaaagatgtggatgagacagtcaaaaggctcagttatacgatctcagagggcatcaatatcgcgatggaggcataagaagcaggggaattcatataatacaagtatgtactccaggaaaatcagaagtaaaagtaagaacacattttaggacaggtcgtgaaggaacgcctgttcttccttaattatgcaaatataatatatatttatctgaaaaaaaatatgtatggtgaaagtcaggaaagatcatagagggaaagatgagaagatcagaacggattgtaaaagcaacggtgtggggattgtgtgtctgccttggcggatatctcgcggcacgggggtatctgcatctgaggcagtctccgggaacacgcgcacagcagatactcggggatatctgtatggagacagagcgggaagcgtatttgtggtatatgccggggatattttatgaggaggggactactactccgctgataacaaaattgtggacaaagatcgaaaactggtatccgctgggcatgtatctgaaagagcatcaggaagaagaacaacatccggtgattgaggatgaaagtacctgttatgagatgatccatgccaatggcaatacgatcgctgaccggctgttgggagaaaatcagagtcaggcagtgacccgggagaacgagacggccagggaaaatgaagagaatggtatgagtagccaacaggagggagaacaggaaaaaaatgggaatgaagaagagcaacaggagagaaaaacagatgagaatgagccacagacaacagagaatgcaggcacagcaactgcacagcttccggcgtggactacagcagtagagtcgacaccaaagatagacctttccatggagcggctcagtgattttcactatctgctgaacaatttctttgtggtagatccgaacacaacagtggacgggtcacagatcaatgccaatacatttttgggagattcgctgacactggaagaagacagcagcgttccgcagatccttatttaccatactcattcgcaggaaggatttgccgattctatcgagggagatgaggcaacaagcgtggtcggtgtgggaaattatctcgagagtattctgcgggacatttatggatatcaggtgatccacagaaaggatactttcgatctgatggaaggtcagctggaccggagcaaggcatataactatgcacttccggtgatcgggcaggtgttggaggaaaatcctacgattcaggtggtgatcgatctgcacagggatggagtaccggaaggaaagcatctggtgacggaaatcaacggaaaaccgacagcgcagatcatgtattttaacggactcagcagaacggtaaaaaacgggaatctggatacacttcccaatccttatatcgaagataatctctcattttcgtttcagctgtcttatcaggcggcgcggtactatccacagttgacacggtgtatttatctcaaaggatatcggtataatcttcatgtgcggccgcgctcgattctcctggaagtgggcgcacagaccaatacggtggaagaggcgatgaatgcgatggaacccttcagtgtgattctggataaagtattgaagggacagtaaaaactatgctataataaaaggcaatgtaaaattacagagtgtccggatacccgatgcaatcagagaatcaggtagatggcaccaaaagaagaaaaagttcaacagtgacaaacacctgagtataaagaaagaaatcggaggtactaaagtggcagattttgatcaaagtaaaattcgtaatttctgtattatagcccatattgatcacggaaaatctaccctggcagaccggatcattgagatgaccggtctgctgacagaaagagagatgcagtcccaggtactggataatatggatctggaacgtgagagaggaattactatcaaggcacagaccgtgagaaccgtatataaggcaaaagacggggaagaatatattttcaacctgatcgacactcccgggcatgtagactttaactatgaggtttccagaagcctcgcagcctgtgatggcgcgattcttgtggtggatgcggcacagggaattgaagcccagacactggcaaatgtatatctggcactggatcatgacctagatgttatgccggtgatcaataagatcgatctgccaagtgcagagccggagcgtgttatcaacgagatcgaagatgtgatcggtatcgaggcacaggatgccccacagatttccgcaaagaccggactgaacgtagaagaggttcttgaacagattgtagaaaaagttccggcaccgaccggagatccgcaagcaccactgcaggcactgatttttgattccgtgtacgattcctataaaggtgttatcgtattctgcaggatcaaagaaggaaagatccgaaaaggaacaactgttcgcatgatggcgaccggtgctgtggaagatgtggtggaagtcggttattttggagccggacagtttattccgtgtgaggagttatccgccggtatggtaggatattttaccgcaagtatcaaaaatgtaaaagatactcgtgtcggtgataccgtaactgataacagcagaccgtgcagcgaaccgctgccgggctacaaaaaggttaacccgatggtatactgcggtgtctatccggcagacggagcaaagtacggagatcttcgtgatgcactggaaaaactgcagttaaatgatgcctcgttgcagtatgaaccggagacatctatagccctcggatttggtttccgctgtggattcctcggactgctgcatctggagatcatccaggaacgtctggagagagaatataatctggatctggtgacaacagcaccgggtgttatctataaagtacacaagaccaacggtgaagtaatggatctgacgaacccgtccaatctgccggatccgtcaactattgaatatatggaagagccgatggtaaaagcagagattatggtaacgacagaattcatcggaccgatcatggatctttgtcaggaacggcgtggacagtatcagggaatggaatatatggagacaaccagagcactgctgacatatcatatgccgttgaatgagattatctatgatttctttgatgcattaaaatcccgttccagaggatatgcatcttttgattatgagatgatcggctatgagagaagcgaactggtaaaactggatattctggtcaataaagaagaagtggatgcactttcctttattgtatttgagggatcagcttatgagcgcggcagaaaaatgtgcgagaaactgaaagaagaaattccgagacagttgtttgagattccgattcaggcagcggtaggcggaaaaatcattgccagagagactgttcgtgcaatgcgaaaagatgtactggcaaaatgttatggcggtgatatctcccgtaagaaaaaacttctggaaaaacagaaggaaggaaagaaacgaatgcgtcaggtgggaaatgtagaaatcccacagaaagcatttatgagtgtactgaagctggatgaggattaaaaactatgaaacctgcagtaagtattatcgttccggtttataatggagaaaagacactggaacgatgcgtggacagtgtgttgaaacaggaatataaagattttgaactgtttctgatcaatgacggcagcagcgataaaaccagggaaatctgtgaacggtacgctgctgcggatgacagggtcctggtgatccacaaggagaattccggtgtgtctgagagcagaaatatggcgattgcccaggcacacggggagtatctgcagtttctggactgtgatgactggatcacaccggatgcgacgaaacttctggtgagggcggcaaaagaggaacaggcggatcttgtgattgctgatttttaccgggtgatcggggagagactgtctcataaaggagatatcgaaatcgatggagtgatggatcaggaagcgtttgtgggctgcatgatggaaaaaccggcagatttttattacggtgtactgtggaacaaactgtaccggcgggatattatcatgaaacatcacctgcagatgaatccggagatcagctggtgtgaggattttatgttcaatctggagtatatccgacatgccagaagattctatgcattgcacacaccgatttattattatgtgaagacgaaaggttctctggcaagccagggaatgaatctgtcgaaaacgatcaagatgaagctgacggtatttacctactataaggacttttacaaaaatgttctggatgaagaggaatacgagaaaaaccgtctgcaggtatatcgttttctgatcgatgcggcgggagacggtatggttgcaccgacgattctgccgggttctcagaagcttggggaagagcgaagcagtctgtacctggaagccgtagaaggagaaggagtgttgatggatgaataccggagtcggaaactttttgacaggtatcttgaaccggtggcaagccagtttgatcttacttttccggagatccgtctgcttctttatctcagccatctgaaacagccggtcagcagaagagagttaagtgattataccaatatgaccagaagaagtctgtcgctgtatctgcagaagctgatggcaaaagggtatatccgtatacaggaaagcagagagaaaaaaactcaggatcgcagaatcaccgtctggatgctgccggaagccgcgcaggtggaagaagcacttgttaatgtacagcgggagtacgatgagacccgctaccaaagtttcagtgaggatgaactgctgcaatatgcatatctgacggaaaaaatcaaaaagaatatgcagaaggtactacaataaatatgcaaaaaaaactgcggcaggatcaacgttctgcctgcagttttttacgttacaggggaaattaacgagacaaagttgaggaagagtaagatgaaaaaagaattggaattatatttacatattccgttttgtatccgaaaatgtgaatactgtgatttcttatccggacctgccgatgagaagagccggcgggtatatctggatgccatgctgcgggaacttgcagcggtgggacctcaggcaaaagaatatgaagttatatctgtttatattggcggtggtacgccctctcttcttccgggggactggatggaggaactgatggaggtggtaagggacacatattgtctgaaaaaagatgctgagatctcgatggaagccaatccgggaacgctgacagcaatcaatcttgcaggatatcacagagcgggaatcaaccggctgagtcttggctgtcagtctacagacgatacggaactgaaactgttgggacggattcatacctgggcacagtttcaggaaagttttcaaatggcgagagaagcgggatttgccaatctgaatgtggatctgatgtccggtctgcccagacagaatctgacttcctgggagaagagtctggaggtgatcgcaggaatggaaccggagcatatctcggcctacagcctgattatcgaagagggaaccccttttgcagagaaaaaaccggaacttcctgacgaggaggaagaacggcggatgtatgagcggacatgggagattttacagtcatatggatatcatcagtatgaaatctctaattatgccaaaaaaggaaaagaatgccggcacaacctgggatactggacacgaaaagaatatctgggatttggtgtgggaagtgcatctctgtttcaaaatcagcgttttaccaatctgagagacctgagtgtgtatggggaattcaacggaaatccggaatcgatccgacgggaccgggaaacactgacagtaggggatcagatggaagaaaccatgattctgggcctgaggctgctttgtggtgtatcacggaacgaattcaggaaaaatttcggaagatccgtagaagaagtatacggaccggtgctggaaaaatacagcaggatgggattgttgaaaatagaaggagacaggatcgctctgacaagagccggaatcagtgtcagcaatccgatcatggcagattttctgctggatgaataaagaggcggaaaataaaaacggcagattgacagtgaataaaaaatatcgtacaattaaaagaacatctgttctgatacatatggagaaaccatagaaaatgtgcggagcaggttaaagggaacaggatgtaaaggagccagatcgctcccggaatctacaggtgtatgattatgcggagcacatggaaaacagaaggagaaaaatacaatggcagtgcgtaagaccggaaaacaatatataaagattcgtggagccaatgaaaataatctgaaaaatctggatgtggatattccgagagatgaatttgttgttctgacaggattgtccggatcaggaaaaagttcactggcttttgatactatctatgcagaaggacagcggcgatatatggaaagtctttcttcctatgcccgtcagtttctggggcagatggaaaaaccgaacgtggaaagtatcgagggactttcaccggcaatttctattgatcagaagtctacaaacagaaaccctcgttctacggtgggaacggtgacggagatctacgattactttcgtctgttatatgcgagaatcggtgtcccgcattgcccgaagtgtgggaaggttatcgcaaaacagtcggtggatcagatggtggatcagatcatggaattgccggaacgtaccaggatccagctgctggcaccggttgtgcgaggaagaaaaggacgtcatgaaaaggtactggatcaggcaaagcgaagcggttatgtacgggtgcagatcgatggcaatatgtacgaactgtctgaagagataaaactggataagaatatcaaacatacgattgctgtcgtggtggaccggcttgcggtaaaaccggggatagaaaagcgcctgacggattctgttgagagtgtgctggcactggcggacggactgctggtggtagatacgatggatggaaactatctgaacttcagccagagtttttcctgtccggactgcgggatcagcattgatgagattgagccgcgaagtttttcttttaacaatccgttcggagcctgtccggattgtctggggctcggatataagatggaatttgatgagcgactgatgatcccggatccgtcgttatccatcgaggaaggtgcgattgcagtactcggctggcagtcctgtgcaacaaagggaagctttaccagagcgattctggatgcgttgtgtaaagaatatcattttgatctgtccacgccgtttcaggattatccgaaggagatccacgatattctgattcatggaactaatggtcatgaagtaaaagtatactacaagggccagcgcggagaaggtgtgtacgatgtggcctttgaaggactgataaaaaatgtggagcgcagataccgggagaccggttcggaaagttccaaacaggaatacgagacttttatgcagatcacgccgtgccgtgcctgcaaaggccagcgtctgaaaccggaagcactggcagtgacagttggagaaaaaaatatttctcagatcacagagatgtctgtcgagaatctgaatcggtttatgaatgaactggaactttcgaagtcccagaaactgatcggagaacaggtattaaaggaaatccgtgcccggcttggcttcctggtagatgtaggactggattatctgacactggctcgtgcgacaggaacactttcgggtggggaagcacagagaatccgtcttgccacacagatcggctccggactggtgggcgtagcctatatcctggatgagccgagtatcggactgcatcagagagataacgataagctgttaaagacactgtgccatctgcgcgatctcggtaatacattgattgtggtggaacatgacgaagataccatgcgtgcggcagactgtatcgtggatatcggaccgggagctggggaacacggtggacaactggtaggaatcggcacggcagaagaactgatgaagaatgacaattctattacaggcgcgtatctgagtggaaagattaagattccggtaccagccgaacggaaaaaaccaaccggatggctgacggtaaaaggggcaaaacagaataatctgaaaaacatcgatgtgaagtttccacttggtgtttttacctgcgtgaccggagtatccggatcaggaaaaagttctctggtcaatgagatactgtataagagcctggcaaagaaactgaaccgtgcaaggacgattccgggagaacataaagagattctcggtatggaacagctggataaagttattaatattgaccagtcaccgatcggaagaacgccacgatccaatccggctacgtataccggtgtttttgaccagatcagagatctgtttgcggcaaccgcagatgcgaaagccagagggtataaaaagggaagattcagttttaatgtaaaaggaggacggtgtgaggcatgcagcggtgacggtatcatcaagatcgagatgcactttttgccggatgtttatgttccttgtgaagtctgccagggaaaacgttataaccgggagacactggaagtgaaatataaaggaaaaagcatctatgatgtgctgaatatgacggtggaagaagctgtgaagttcttcgaaaatgtcccgtctatccgaagaaagatcgagacgctttatgatgtcggactctcttatattcgtcttggacagccatccacgacactttccggcggagaagcgcagcgggtgaagctggccacggaattatcgagacgaagtaccggaaagacgatctatattctggatgagccgactaccgggctgcattttgcagatgtgcacaagttgatagagattctgcagcgtctgtcagaaggaggcaatacggttgtggttatcgaacataacctggatgtgatcaaaacagcggattatattattgatatcggaccggaaggcggagaccggggaggtacggtgattgcgaagggaacaccggaagaaatagcaaaaagtccgatctcatataccggaaagtatgtcgaaaaatacctctaaaaaaaacttttcatttcaacaggaattgattataataaactgaaagcctgttacagggaacaaaaggggcggccatgcaggattcgccgtgggagaacaggcagtgtacaggaaaggggattattatggcagcagcagatattggaattgatctgggtacttcaagtattctggtttatacaaaaggaaaaggaatcgtcttaaaagagccttccgtagtagcgtatgataaggatgcagacaaggtcaaagccatcggggaggaagcacgtcagatgatcggaaggacaccgggaaatatcatggcaatccgtccgctgcggcagggtgtgatttccgattatacgatcacagagaagatgctgaaacattttatacaaaaagcaatgggaagaaaggcgtttcgcaagccaaggatcagcatctgtgtgccaagcggcgtgacagaagtggaacgtaaagctgtggaagaagctacttaccaggcgggagcgagagaagtatatatcattgaggaacccattgcagcagcaatcggttccggcattgatattaccaagccgtttggcaatatggttgtcgatatcgggggaggaaccacagatattgcggtaatttcccttgggggtgtggtggtttccgcatctatcaaggtagcgggcaatgattttgatgaagcaatcatccgccatgtccgaaaagcacacaatctatttattggagagcagactgcagaagccataaagatgaagatcggaacagtgtgcaagcggccgcaggcagagacgatggaagtgaagggaagaaatgtgatcaccggtcttccgaagactgtcaccgttacatcagaggaggtacgggaggcattgcaggagtgcaccacaaaaattgtggaagcagtgcacagtgtactggagaagacgccaccggaattggctgcggatattgtggatcggggaattgtcctgaccggaggcggagcacttctggatggatttgaagaggtgatcagccagagaacgggaatcaacaccatgacagcagagaatccggcgtgtgtggtagccgaaggaaccggacggtatgcggaagtaatggaagagttaggaaaataaagcatgtcacaggatacaatcgaagggtatgtggatcatatcatatttcgaaatgaagataatggatatacagtgttgaatctgattgtgaaaggatcggaagtgacctgtgtggggacatttgaatatgtaggcgagggggaacttcttgaacttcatggtttctatgtggaacatgccacatatggacagcagtttaaaatggagtcttatgaaacgaaacttccggaagattccatcgctatggaacgatatctcggctccggcgctatcaaaggcgtgggagccgctttagctgcaagaattgtgcgaaagtttaaagacgatactttgcggatcattgatgaggaaccggaacgtcttgcagaagtaaagggaatcagtgaaaaaaaagccagagagatcgcagagcaggtggcagaaaaatcagagatgcgaagtgcaatgatgtttctgcaacaatatggtatttccgtcagtctcggtgtgaagatctatggaaaatatggttcccgtgtctatacggtattgaaggagaatccatatcagctggcagaagatatccagggaatcggtttccggattgcagatgagattgccggaagaatcgggatccataccgattccgattatcggatcagaagtggtctgttttatacactgacactggcagctcaggacgggcatgtttatctgccggaacgaatacttctggcaaaggcttcggagcttcttggagtggagccacagcatatggaaaaacatattatggatcttgccattgagcggaaagtggtaataaaagaaattccggtggaaggcgcagttaatgaaaatggagaaccggagacggaacggatcgtttatggcagccagtactattatctggaactggatacggcgcgacggttgtgtgaattgaatattcaatcggaagaaaatgaagaaacgattcggaaacggctggcaaacattgaaaagaaaaatgagctggaactggatgaactgcagagagatgcagtggttgaggcagtgaaaaatgggcttctgattatcaccggaggtcctggtaccggaaaaaccacgacgatcaatgccattattcagtattttgagatggaaggcatggatatttttcttgcggcacctacgggaagagcggcaaaacgaatgacggagacaactggctatcaggcatctacgattcaccgacttctggaactgtcgggaatgatggacgattcatctgcagcagtacattttgaacgaaacgaggagaatccgctggaggcagatgtgatcattatcgatgagatgtcgatggtggatatttccctgatgcatgcactgcttcgtgccgtacaggtgggaaccagactgattcttgtgggtgatgtcaatcagctgccgagtgtgggaccgggaagggttttaaaagatgtgatcgattcccggtgctttagggtagtaaaactgaataaaattttccgacaggcaacggagagtgatatcgtcatgaatgctcataagatcaaccgtggagaaaccgtgaaaatcgataataaaagcaaagactttttctttctgaagaggtatgatgcagatgtgatcgtagccggtatcgtatatctggtacagaaaaaactgccaccatatgtgaaagcaaaacctctggatattcaggttctcacaccgatgcggaaggggcttctcggagtggaaagattaaacgaggttctgcaaaaatatctgaatccgcaggatgcgaaaaagaaagaaaaagaaaccggaaaaggactgtttcgagagggcgataaagtcatgcagatccggaataactaccagctggagtgggaaatccgtgggaagtacggtatcgctgtggataaaggagtcggtgttttcaatggtgatatgggtatcatagaagaaatcaatacctttgcagagacattgacggttgtttttgaagaaaaccggtatgtggagtattcttttaaacagctggatgaactggaacttgcttatgcagtcacaatacataaatctcagggaagtgaatatccggcagtgattctgccacttctcgggggtccaaggatgcttatgagcagaaatcttctgtatacggccgttacaagggcacgtacctgtgtgacgatccttgggagtgaagtgacttttgaagagatgatccgaaacaaacaggaaaaggaacggtataccagcctgtgtcagcggatcgaggaaatgaatgaacagtaaaagattattggactggctgtatccgaggcggtgtgcattctgtgatgaggtgcttggaaacatggaaaaatacctgtgtcacagctgccagcgcaggatgccgaaaccgatcggggagccaaattgtaaaaaaggcgggaaaccgctgcttcgggaagaacaggaatactgttatgactgcaaccggcaggagccatcatttacccgggcaaaagggttgttcctttatgaagatccactgaaagaatctctgatgggactgaaattcagagaacggaaagaatacggcatttttctcggaagactgatgggattatacggagcggattttatccgacaggtacatccacaggtgatctttccggttcccattcacagaaaaaagaaaagtgtgcgaggctataatcaggcagaagtccttgcacgggaaatcagcagagggttttccataccccttcgtaccgatctggtactgcggaaaaaatccacaaaagcacagaaagagctgagtagaaaagagagaaaaaagaatatggaacgggcatttgttgtaaaaaaagaggcaggaatgtatcgggatattcttcttgtagatgatatttacaccacaggaagtacagcgaacgcaattgccggaaaattgaaggcagttggggtgaaaaatgtttatgttctgacattgtgtatcggtaaaggaatttaaaaagtaccttttaatgcacggaaagatatggtaaaataaatcatgtatgattttgcccaaaaggcatagaaatgaatcagagataacgaaaaacagttgaaacggtcaggtgaggacacatgctgaagaaagaaaagattcgtctgatgacgaagctggcaagatatgaaagcggagaagggaaagaagaactgcggattgcccggtattatcgcagtgattatatcggtctggcactgtttcgcaattttttcctggcaagtatcggatatctggtgattttgttacttgtgggagcttattttgcagaatttcttgctgatcagctacatactctgaatgtaacctggatcggtatgatgatcgttggcggatatctggtgacgattggtgtgtattcggtggttacttacacgctgcatacgatccggtacggaagagcccaaaaaggagcagccgcttatgaacggaggctcagggagctggaagcactgtacgaagaggaataagaataaacaggaggacagcaggatggaaaatgctttgctggaattgaagggaaaactgaaaatgttatatgccagttatggaagctatctgctggtactgtttaagtttctcctggcatttcttgtatttgaagaaatcaacaggctgctgccatatgtggaaggactcgatcagatttttgtggtgttacttgcttcattgatctgttctatcatgccgtggaatctgatggtgtttttgggaatgggactgatcgttggtcagtgttatggtattggcatagagattgcaggatttgcactggcgctgatcgtgattatggtgattctgtatctgcgctttacaccccaggatgcgttggtattacttttgacaccggtagcattttcttttggtgtgccgtgtctgatccctatcggttacggcctgaccagaacaccttcgtctgcaataagtgcaggctttggtgtgattttatattattttatggaacttgtttctgacaatgcttcggttctgaccggggcagacaaagaagaaaagatacagaatctccagtttctttcggacggactgatgaaaaatcaggagatgatggttacgattattgcatttgttactgttctggtgatcgtctatgtggtacgcagactggaagtggaatatgcctggcatattgcggtttttggcggcggtattgcatatatgatcattatggctgccggaggaatttttcttgaggcaacgattccggtggtaccactggtggcaggaacgatggtcagtgtgtttgttggagagattctggaattctttttctttcatgtggattataagcggacagaacgtctgcagtttgaagatgatgaatattactattatgtaaaagcagtaccaaagataaaagatatgaaaaaaagcagtggacggaaaccggaagaagtaccggtggatactactgttataagaaaccgggaaagggagtgaatcagtgggaaatgttatagaatttatcaaatatcatctgcgtatgacaaagttttcactgccgtcttctattagaattattgatatcgtacagattctgctgattgcgatttttgtatattatctgatggtatggatcaagaataccagagcgtatacactgttaaaaggtgttctgattgtcagtgtttttctgattattgcagctattttacggatggatacgattttatggatctgtcaacagctgagtgtggttgcgatcaccggcgtgctggtcattttccagccggagcttcgccgtgcactggagcagctgggagaaaaaaagatgttgtcaaatctgattccttttgacagcagcaagcagatggatgagcgtatcacggaccggacaatcggtgaactgatccatgcagcatatgcaatgggggaagtaaagaccggtgcgctgatcgttgtggaacagaacattattcttcaagagtatgagaagaccggaatcgccatggattcgctgatcagcagccagctgctgattaatattttcgaacacaatacaccgcttcatgacggagctgtgattgtgagaaataaccggatcgtatcggcaacctgctatctgccactgtcagataatctggaactgaataaaagtctgggaacccgtcaccgtgccggtgtgggaatcagtgaagtcagtgatgcactgacaattattgtttctgaagagaccggaaaggtttcttatacgtacggcggtaagattgtcatcggtgtgacaccgggagcactcagagaacgcctgaacagtatgaagacacgcaaagaccataaagaaacaacaggtcttgccagaatatggaaaggacgggcaaaacatgaagaaaaaactggcaaataatctcagcctgaagatcatttccgttttgattgcctgcgtgatctggatcctcgtttcaggaacaatcgatccggtaagaaccaacgtacggtattccggaataaaggtagaagtgaaaaatgacggatatatctatgatgccggaaaatcctatcagatcgcagatgaatatcagacggtaacggtctatgtgaccggaaaaaaatcagtggttgagggaagaacggatattgcggtggaggcggatctgacacagatcgttaatatggataccaagccggcgtatgtaccggttacactgaagtctgtcagcggaatctccgaagaagatgtgaccattattccgaagacgataccggtgaccatcgaggataccgccacgaaggaattcctgatcatcggtatggctacaggaacaccggcaaacggttatgtagtaggagaatgcagtacagatccggagaagatccagattcagggtccggaatcagtggtaaataaaattaagagtgtggtagctacagtggaggcagacgggttgtcatcagatgctacgaaaaaagcgaaaatcacactgatcgatcagaatggcgaaccgatgtcggaagaatatctgcagttttttaatatcagtgatgatcattatgtaaatgtgtctatgaaattatggcgggtaaaagataacgtaaagatcaaggcaaattacagcggtactccggcaaaaggataccaggtggataagattactacaacgccggagacgatttcaatcgccggaagtgaagaagcattaaaaaaactggaggacaatggaaataccctggagattcctggtgaactgatcaatgtggatggtatcaattccgatctggaagcaaatgtaaaactcagcgcattgctcacagaggaagaggaactgaagattccggaagaagtaggacagtctgtagctgtgaaagtcagtatccttccatatggcagccgggaatacgacctgaaagcagatgcaattcaggtacagggactgagttccgatctgagagtaagttataataaagaaaagatttctattcgtgtcaaaggaacggaagcaaatctgaatgcgctgaaggtggaagatatcaaagcggttattgatctgacgggaaaaacagcaggggaatatacacttccggttaccataacattgccggagggttatgaacaggtagaagaggtacaggctaccgtacagctgaatcaggcagaaaaaacaagtgagtagaggaattttgagatggtaagtaagaaagttacaataaagaatcctaccggactgcatctgcgtccggcaggagaattatgtaagacagcgatgcagtttaaagcaaagatcacattctcttttgaaggaggtacttctaatgcaaaaagtgtattgagcgtacttggagcctgtgtcaaaagcggagatgagattgaactgatctgcgagggtgaggacgaagaagaagcactgaaaaaaatggtggaagccatagaagcaggattgggcgaataaagatgaaaacagaagaaaaagtaaaatgtccctatgagaaaaaatgtggcggttgtaaataccagggaatcccatatgaaaaacagttgaaagaaaaagagaagaaagtacgaaaactgttaaaggactatggaaaaccggagccgatccttggtatggaagatccttattattaccggaacaaagtccatgctacttataagcatatgagaaacggtgatattgcagtgggaagatacgaagaaagcagtcaccgactggttcccatcgaatcctgccagatcgaagatcagaaagccgatgaagtgatccagaccatccgcaaactggcaaaatcctttaagatcaagatttttaacgaggacagcggttacggtcttcttcgccatgtactgatccgtacaggaagaaagacaggggagatgctggtagttctggtagttgcttctccggtatttccttccaagaataactttgtgaaggctctcagaaaagagcatccggagatcacatccatcgtgctcaatatcaatgacaagaagaccagtatgatcctgggagaacgaaatatcgtcttatatggaaaaggatatattcaggatgaactctgtggctatactttccggatttcaccacattccttctatcaggtcaatccggtgcagacagaacggttatacaagaaagcgatccgactggcagacctgaagggaaaagagaaagttctggatgcctactgcggtatcggaaccatcggcatgatcgcttccaaacaggtaaaagaagtgatcggtgtggagttaaaccgtgatgcggtcagggatgccatcggcaatgctaaggggaatggtgtgaaaaacattcgtttttatcaggcagacgccggcgagttcatggtagcgatggcagaacagggtgaaaagatggacgtagtcttcatggatcctccgagagccggaagcgacgaagcctttcttcagtctgttgtaaaactggcaccaaagaaggtcgtttatatttcctgcaatccggaaactctggcaagagaccttggatatcttacaaagaaaaaatacaaagtaactaagatctgcccggtggacatgttcccgttcacagatcactgcgaggtgattacctgtctgcagcgggtggaatcataaaaaacacgtaacggttcagtaccttaacagttacgtgcaaaaatacatttaagaggcttgctttcaaatgccctgaaagcaagcttcttatcattaatacaggaatccagtcaccaattcataaacctttataagtttttcccgaaacgagttgtcaaggactttttaatcaaatttacaaaaaagccacaaaaaagtgccagaagcactttcatgctcctgacactcagacgggtaggattacttttccccggcaaggattttttcgcaaacggtctggtattccggcagccgttcaaggaaggggttccagcgccgctttatctcggccagttccagaggatcggcggtctgttcggtgtggttgttgccagtcatctgcaacacatccatcgacacctcggaaaacagcacttcggcaagctggtcggcggtgtcaacgagtatttcttcctcgacataccgcttttttgtgctgattttcagcagcagatagcccagcttatcagaccagagccattccagataggggctttcccagatgtagtcggcaaacaccgcgtaaaccctctcaatctctttcttttccgtttcttcgtacagcattttcatgtcctccttggctaaaagttttggtgtgtaccatcatcagtttagcacaaggcggctgactttatcagccggtcacatctgctgtatctcgtttttgagcatacgcttgattttgtcgctcatggtttcagtgctggtattgctgaaatggacgcgcaccttgtaggtggtcttgccgattttctttaccagcgcgggggcgtcctccggcgctctggccagggtggtgtctacggtctgcatggtgcgggtttcttcgctcatggcgctcctttctccgggcggggctgcgccgtccggcaaaaaattactcatgcttacggtttacaatgtctttcgccgcctgcttggtggctccggcgttttcctcccggaagttctttccggcaaagaggagcggggcgcaccgttccaggatacggttatagatacgggcgtgggccaggtcaggtgggttcttgagttcggccagtttcaggttggtggtgattatcatgggcctgcggctgcggtagcggctgtcaatgatgaaaaacatctgctccatcgcatactcggtgctgcgctccacacccaaatcgtcaatgatgagcaggtcgtactcgtcaaaactggcgataaagtcggccctgtcctcggagaacatccccgtcaggcgattcaggatggtgggaaagtttgtcatcagcaccggcacatcccggtcaagcagggcgttggcgatacaaccggcgaaaaaggatttgccggttcccacatccccaaacagtaacaggcggtgttattcttgtaagcctccttccagttctccacataggcgcgggccttgtccatcaggggattttggccgttgtcgttggcaaaggtgtagtcgtacagatagcggtcttgcaggccctgggccttccgccgcttgatacgctccatgcggcgctgccgttcttcggcggccttgcgctgttcctcggcctcccgctggcactggcagatacagcggggcatgaagtagccgggtttcccaaagcatggcacaacagtctgtctctggccgccgcacttcttacagtgaatgaggccgcccgccgtgtttcagggatttcagatacagcttgagcaggatgttggagtacagaacaccgtcctgcatactttccagcagcacgatggagtcatcgtcaaaatagttctctttgagtttcaggtagtaatattttcgattgtctgacatgggttcctcctttgggttcgttttgggcttctgtacgcatttagagggccgttttgggggccagaggataaatctatcaggcccccagcgacaccctcgaaaaagtccttgatttacaaggagttttcggcccctaaagcgtgacacttagccctctgtttgctcttacgctgggcggccttgatacgcttcatgcgcccagccgacggcggcgttctcaatcccatcatcgcagtcaagggagtaaaacgccttgtagcggtacatcttgcgctccctgcgacctcggcccgcttgtccagcaggaacgtttcaacgatttcatccgacacctccacaaaggtgtcctcggtgcagaacgggtaatattgcttgaggttgatcgtctgcataggctcgccctcactctgccgggaaaaggcagtcatagcagcggcgcatattccgcaggccccgccggatggcaacgctgaccttgctgctgtctacgccctcccttcgggagatttccggctggctaataccggcaatgtagtaggctcggacgcggcgggcctgtgtgggggtggcatgggccagggccttcggcaaggcggccagcagacgcagatgggcggcccgttcctcgcgctccaaaagaattttctccggcgatctgccgtgttccagcgcatagttctccgtccagctatatgcgtccagagagtagtaggcgcggtggagtgcataattttaagtgtaaatgacacatacatggacgcacaggaggttatgcacatgactgattatagcaaaattacagccctttactcccgcctttccgtgggcgacgaggacagggacggcggcgagagcaacagcatacagaaccaaaaaatatttttggagaactatgccagagggcagcacctaaccaatatccggcactacatcgacgatgacgaaagcggcaggttttttgaccgttccgcctactcccgcatgatggacgatgtggaaaacgggaaaatcggcgtgtgcattatgaaagacctgacccgctgggggcgcgattatctccaagtcggcaacgcaatggagatattcagaaggaacaatgtgcgctttatcgcggtcaacaacggcattgacagcgagaagcccgacacattggagtttgcgccctttatcaatatcatgtcggagtggtatgcaaaggacatcagcaagaaagtgaaaacgggcattaagaccaaaggcatgagtggaaagccgattgtcaccgaagccccttacggctatgtcaaagacccggacaacaaggatttttggataatcgacgaggaagccgccgaggttgtccgtttgattttccgtctgtttatcggcgggaagaaccgcaatcaaatcgccgtatatctgacacaggagcaaatccctacccccactttctatatgaaagaccgggggcggggaacctgtaaaaataagacgctgggcgaggagaaccgctgcaagtggaacaaagccaccttgaccaatatcctcacacggcaggagtattgcggcgatgtggtcaacttcaagactacaaagcatttccgggataaacataaccactatgtagaccggagccagtggcacatcacagaaaatgtgcatgagccgattatcagccgcagcgattttgaaaccgtacagcggattttggaaaacgcacccgtcagacgccccaacggggacggggaaatccaccctttgtcgggcttacttttctgtaaggactgcggcgcaaaaatgcacatccgaatagattacagatacggcagcaagcggcacgttgcctattgcagcgagtaccacaagggaaaagccaagaaccccaagtgtcactccccgcacatcatggacgcggacttgctcatgcagaccgtcgcggaagtgctgaagaaaatcgaggactattctatcagcaaccgggcagagtttgaagccttagtgaaaaagaaccttgtcatgcagcagaccgaccagaccaagaaacagcagaagcgtattccgcaaatcacgacgcgccttgaacagattgacaaggtgctgaataagctctatgaggacaacgccctcggcacgatcccgcaagaccgttatgagcagatgtcgcagaagtattcggaagaatactatgcgctgaaagcggagcttgccacgctccaagagcagctatccgcttatgagaacgcgggaggacgggcgcagaagtttttgaagctgacggaacgccatgctacctttaccgagcttacccccgccattctcaacgagtttatcagccggattgaagtgcatgagcgcgaccagaaaagggcgagatacgcaatccagcacatcagcatatatttcaattatatcggcaagtttgagaatgaagtgacacagcttgcagagcctacggagcaggaaatccggcaaatgcgggaggaaatcgaagaagccaaaaaggaaaagagccgcgcataccaccggcagtattcaagggagtaccgggcgcgaaaccttgaaaagcagcgggagtatgaccgtatcaaggcgcgggaataccgggcgaagaaaaaggcgcaggcagccgccgcacagcccacacagtaaaacagaataaccgtcaaccaagagggattttccgagttacgggaaatccctcttttgcacccggagaaaggagccgcctatggcagaacagacccccgacaatatcatcacgacccagaggaacgggcagaccattgttgcggagttatttttcaatcacagcagcacagaaacattccgcgacaagctgctcaaactggtgcttgccgacagcacgcgtttatccgcgtctgacggtcaagagccggaaaaaacagaaatcttgcgataacagccgccctgacgaaccattccctgtccgggcgatttctatttgaaaatcctcattttccccaagtcaagagccgggaaaaacacccgaaaaatgcccctactgcgtaacaggggcacagaaaggagagtttatgagaacagggcttacgaagcaggaaaagaccaccgatatttggtttgacgagaaagacccgctaatccatatccgcacccacaacaccgacctaaagaaacggatgcttgcatacagccgccgctacccggagaactgcaagcagaccgacaccgacccggaaacgggctgcatggagtttgaggttgagaaaggacgcttctctttccgtctgaccgcaccatacagcgaggaacggcgggaagcagcgcggcaatatgccagagaaaacagcactacaaacttgttgaaataatgtggatttgttcatgttcttgtgctatacttttctcaaaggcacagaatggcagatataaattcgtgggagaaaaaatatgaagaagcatagaaaatgtaaaaagataataatagcttttgtaacagtgttgtttatagcatttgttgcagtaattgggctacacaaaacagggatttatcgttttgatttcttaaaggacatctataaaaaaattgattttcaactaaatacgaatgagcttaacattccgcaggacgctctttcattttctgtttatgatattgagcaagaagaatatttattttacgagggtgatagccagttgcccactgtcgcaagtttggcaaaactattttccattgattatgctttgggaaaagtagatttggaagatattgttgaagtaaatcaagaggtattagaacttgttccggcgggttcatctttagcaaatctgtatgctggggaatacacagttaaacaaatcatggaggctatgcttgttccttccggaaatgacgcagcctatgcgttggcatatcatatcgctaaaaacgaattaggcgaaggttatacagcaacggaatatatagattatttcatgacagaacttagtgagtatttaatcgaagcaggctattccaaaacaaatttatataatgacccaagtggcgcgtctatgcaagctgactctcatttagatgacattaaccgcgtagcgttgaagctccttaactacgattttgttaaagaatgtattggaaaaagcgaattttcaattcaaactccgcaaggtgaatttacatggaaaaatacaaatgaatttttagatgaaaattcaccgtactataatgcaaatgttaaaggaatgaaaacaggaacaatggcatcttcctataacattgttgttctgtatgaaaaagatggaaaagcatatttaattacctgtttagcggcacactcaaatgaggggagatataaagcggtacagtctgctatcaacacgattattgaataatgatgatgaaatatcccgtttaagtaaagtgtcaaaacaataaaggtaagataaaacagcacacaataaaacttaatacccacccaaaagggcagccgagaaatcgactgtcctttttctacgccgacaggcagaaaggagcgaccacctatgacgaaaccgagagagaaaacccgcgaagaactgaccgccgagattgaggacagcaagaagaaaatccggcagtatgagaaccgggaaaagatgttgcggcaaaaactgtcccgcgaggaacgccggacacgcagccaccgtcttatcgtccggggcgcagtctttgagagcattgtgccggaagccaagaccatgaccgacgaggaagccgccaacctgctccggcttgccttaacgggcgaggaagcgcgggcatatctgaaaaaacgagccgaggacgggaacgccggataaagccctttggaacaaagggcgcacttatacacccttgcgggcgtgtgcgctctgccgagggcttatctccgcacagggattttaccccgcgctccgatatggcggctttgccgcaacaaggggctgcaccccttgcgccgcttcgcggctatccctgcacacccacaaaaacagtacacccgctgttggcgtctgtaccatttttgcgggttttattatcctatccgggaggtgatacccatagccatttaccattggaacatcggcattgtgagccgaggaaaaggcaaatcagccgttgccgcagccgcctaccgaagcggagaaaagctgacaaacgagtgggacagaatgacccacgactacacccgcaaaggcggtgttgtccatacagaaatcatgctgccgccccatgccccgccctctttctctgaccgttcaaccttgtggaacagcgtggagctttacgagaaagccgggaacgcccagcttgccagagagattgacgcggctctccctatagaattatccagagaggaacagatccggcttgtccgggaatactgttcctctcaatttgtttccagaggaatgtgtgtggattttgccattcacgacaccgacagcggcaacccccattgtcatattatgcttaccatgcgcccccttgacgagcgcggcgcgtgggcggcgaagtccaaaaaggaatatgaccttgatgaaagcggtgagcgtatccgcttgccaagcggcagatataagacgcacaaggttgacctcacgggctggaacaacaaggacaacaccctcttgtggcgcaaggcatgggctgactttaccaacgactttttggagaggaacggaagcccggagcgtatcgaccaccgcagcaacgccgagcgcggcattgatgaaatccccaccgtccacatgggcgtggcagcttgccaaatggagaagaaagggattgccaccgagaaaggcgagttaaaccgaaatatccagaaagccaaccgccttatccgggaaatccgggcgcaagtcggcaagctcaaagaatggctgtcagagctgttcaaagcgcgggaaaccgccctggagcaaccgcccaaatcccccgaccttgcaagcctgctgatgaaatatttaagcgttcagagggaaaagagccgcaaatattcccagagctggcagcaacagcacgccgccgctgaattgaaaaccatagcccagacggtcaactatctttccgagcatggtatctccacccttgacgagctggacgcttctctttcctctgttagtgagaaagcctattcaatccgggagggaatgaaaactgccgagcaacgcatgaaagaactgcaaaagctgatagagtacgggaagaattacaccaagcacaagcccgtccacgaccaactgaaaaatctgaaaaacggttggacgagcaagcgcgataagtatgaggaagcccaccgcgccgagcttgccctatgggacgcagcaaaccgctatcttcatgccaagctaccgaaagaaacaaagaccttgcctatcgctgaatgggaacaggaatacgctgacctcaaagagcagagggacggcgagtatggcaaactgaaagaagcccgcgccgaggtgggcgagcttcaaaagatacgcaagtgtgtggagattgcccgccgcgccgaccagccggagcagatccacaccaagcgacaggatttagaccgatgaaaggagctgatttttttgttttataatcaagaccagatagaccgggcgaaccaagccgaccttgtttcttttctacaaggacagggcgagcagcttacccacgccggacaggaataccgctggaaacggcacgacagcttgaccgtccggggaaacaaatggtatcgccacagccagagcaaaggcggcggccccgttgattttgtcatggagtttttcggcaagagcttcaccgaagccgttgaacttctcacaggggaacagggagcagccgcgccggacagaccaagccccgcgcccctctctgattttcgattgccgccccgcagcgataccgccggacaagtgaaaagctaccttaccgaagcccgccgcattgatgaagatgtgacgggcttttttctttccaatggcgacatttacgaggaagccgcccaccacaacgccgtattcgtcggcagagatgaaagcggcataccgagatacgcccaccagcgcggcacagccgggaacttccggcttgatgtgaaaggcagcgacaaagcctttaatttctcctatcggggcgtgggcgagcggttatttgtctttgaatccccgattgacctgttatctttcctctgcctgttcaaaaagggctggcagaagcaaagctatttgtcactgggcggcgtgggagaaaaagccctcttacgctttctctctgaccgtccagacattcagacggtttacctctgccttgacagcgacgaagccggaaacgacgcttgcagccgccttgtgaagctcatgccggagggctacatcgtccaccggcttatccctcttttcaaggattggaacgaggtgttgcagcaccgggcagaaatcacagacgggaagtatttgcgggaagcagtctacggcttgaaagagccaccgcaggaagaaaccgttgagattatccgcatgagcgaggtggacacacagaccgtcgaatggctatgggagccgtatatcccctttgggaaagtaaccattgtgcagggcaaccccggcgagggcaagaccacctttgccctacgccttgccgcagcctgtaccactggcgggacgcttccgggcatgaagcccatacagccgtttcaagtgatttatcagaccgccgaggacggtttgggagataccgtcaagccacgcttgatagaagccgaagccgaccttgaccgcgtgcttgtgatagatgaagcaaaacgggaacttaccctgtccgacgaacgcatagagaaagcaatcacgcagaacggggcgcggctgattatccttgaccccatacaggcgtacatgggcgaaaagaccgacatgaaccgggcgaatgaagtgcgtcccattttccgcagacttgccgaagttgccgagcgtaccggctgcgccgttatccttatcggacacttgaacaaagccgccggaggacaaagcgcataccggggcttaggctctatcgacttccgggcggcggcgcggagcgtgcttttaatcgggcgcgtgaagcgtgagccgaatgtgcgggtaatcgtccatgacaaatcttcccttgcgccggagggcaagcccgttgccttttgccttgacccggaaacgggcttttcgtggataggcgaatacgacatcaccgccgacgagctgctgtccggcgcgggcggcaacaacgccaccaaaaccgaacaggctgaaaggctgatacttgacctgcttgcagacgggaaagagcttgccagcgaggacattgtaaaggccgcagccgaagccggaatatccgagaggacggtacagaacgccaagcgcgacatgggcggcattttaggcgcaaggcgtgtcggcggtcaatggtacaacttcctcaagaagaagcagccgcccgaacccgcaagctgaaagtgcaaaacgcagaccctttgcactttgcactttcgcactttcactataatttgcgtcaataactcaaaaaagcacttgacaaaacgcttcatggtagaccttccggtgctcatagttgttcatctcgcgctgagcctgccgcatgacctcccaaacttcatcgctgacctctacaaactcgtcatgccggtagtggggataaatccaccgcagattgattgttttcagaggcttacctcctgaaaatgggagaggcgggcagcttgtccgctgtccgcctcccgctgggataagggaaacaatccctttcacttggtagccagaaaagggggcattcgttagggtagttcgcaaagaatttcaaaaattttttccgaaccgcgtcaatgctctcatagacggatactttggagcagccgcacaccgtcccgatctccgcaagggtcagcccgtctagggcatagagcaggaaccggcggcgctgggcctcggtgcaggtgtacaggacggccatcagctcccccagcgtttccatacggcaaaggtattcttcctgtgtttcgccgtagatacccacgccctcggtggcaactatgtattcgtcaaactcccggccatcccaatgccgccgctgctcatgggacaggttctcggctttgtggtcggcccggtcaagaaattcatagacttccagcgtgacctccacggccacagcttgtccgttgtaattgatggtgacttccatcggcctttcctccgttcagatttttgcgggaaaatctgaacggggtggcgggaaacgacaccgggggcatggttcgggccatgttggcccgaaccatgccccgtaggtatgaaaaaacgcccggacagcatgaagcgattcgagcgcaaaaaatacggtattcagttacattgtgacaattttcgcactggctgccagacggggcctgtccggtggccgggctttttttgacgatagtgcaaatatcgtctgaatttgtcggcggtcagtatgcttcatggcgactccctcctaaatccgccgtgtcagcgtataggcgtcactcctttgtcgagggcataagaaacggcggctctgaaattcaaagccgccgtttcttataggcgtgttgataggactgctggacgacgactttttttctttgccgccgtccggcagatacctttcttattgcttttaacgggttattccatctctctatagcgagaagcaatttcctccgtaatcggaattagtctgcaatcttcaatcgagtacacctgattgcatagttgttcaatgtctttgaaatggtgtgaagtcagaaaaatggtcttgccttccgctttcagcatacggatgatggcctttacatcctcataggttttgtagtccagtgcgttaaaaggctcatccaaaatcagaatatcctgcccctccataatcgcctgtgcaatccccagtttctgcttcataccaagagaatagttgtctactttcgttttattatcagggtcaagccccactttgctcatggcctgtcggatttctttttctccaattttcccttgaatgtccgcaagaaatttcagattttgaaaaccactgtaaatgccaataaaaccgggggaattgataaatactcccaaactttcagggaagtcgcggccatttttaccaagctgttttccgcgcacataaacactgccccgatcaggcttctcaaaaccgcataaaattttgaacagcaccgactttccgctgccgttagcgccaaccaaaccaacagctgttccctgttctatggacagtgaaacgtcttgaagaattgccttgccaccaaaactttttgatacatttttcacttcaatatatgaactcatattctgtcctcctaattcaatattttcttgtagccacacataaggattcctgcaatcatcagcgttaaaatagcggcctctatcccaaaggcggacacagcggaaattccaattcccggttccacaacagaaattcttgtcaggctggaaaggccaaaaggcgaataagctacccaattccccggaaggacacagagcagatttccctccactaacacaaggaaaccgattgtaacctgtcttgtgacaatgtagatgccgagcataatcagatattgcgccaatatatcaaggcacttcatcaaaaccgcatagagcaggaacctgaaagaaacgattgttaatccagtgctgaatagggatgaccctataaggccagccataagccaaaagattgcatataccatgagaaactttatgctgaccaataaaatgctcttcatcaaatgcctgcggcccttcgagcgcacagaaacaaatatagattgcccgttcactgtttgctccacaaaagcggcaagcaggtaaaggggcacaccgccggtaatcagcagttcaagaaaaggtaaaacttgaaaatatccggttccatgtcctgcaaacagggcataaatccattccaatcctgatagggcggtgccattgcctaagcctttgtaaatcgaaactcccaacacaacacctaaaagaatcagcaaattacgagggatcatgagcgcatggaaatagtagaaggcttaggaaattgttctggtattaagcaagtatattaatcccgacatacggtatatcagaatgcattatcaaaaaaattgctaggttaggttatagaattttggataatacatgtccgcgtgttaagtttgtacaaagaattgtttctgacgcatcaaaaaagggatggatattatactagtaggggctaaaaatcatccacaaactaatgaaataataggatgtattaaaacgagagtaatattgatacagaatatagaaagcgcaatgagcataattccgagattgttagggagtatcccaaagtttgtgtaaacctccaaactgatgtaagatagaattactcagtttggaggtttattttatggcaagaaaaaaggattcaccacaaaaagcagcgcttagagaactcatgggaaactacctgaaagaaaacaatgtaaaagtaaaagatggaacagatgttaattccattatgcgggatatgatgtctatcattttggaaggtgcccttgatcaggaactggatgaagaactgggatattccaagtatgattatcgaaataaagaaaccgataattccaggaatggatattcccagaaaacgttacataccagttacggaaatatggagattgatattccaagggatcgaaaaggtgacttcgaaccacaggttgtaaagaagtatcagaattcgattacgcaggacatggaagaaaagatcatttccatatacgcaaaaggaatgactactgccgatatagaaagccacatgcgtgaattatacgatcttgagatctccgacagtactgtcagccggatcactgataagatcctgccaatagtaaaagaatggcaggaaaggccattagaaagtgtgtatgctgttgtatttatggatgcgatccatttccatgcccgtaatgaggggcggattgtaaaacgtgctgtttacattgcgattgggatcgatatggaaggacgtaagtatgtcctcggaatgtatgttggtcaaaatgaaagtgccaagttctggctctccatcctgaatggcctgaaaaaccggggtgtagaagatatattgattgcgtgtgtggatggactgaccggttttccacaggcaattgaagcagtatttccccagaccgagatccagcagtgcatcatccatcagatcaggaataccacgaaatttgttttttacaaagagatcaaaccacttatggcagatctgaagcgtgtatatgcagctcctacagaagaagttgcattggcagaactggacagctttgacgaaaaatggagcggaaaataccctaagattgcaaagtcatggaaagataactgggcaaatctttcaacgtattttaagtatccggaagctgtcagacgtctgatctataccacgaacacgatggaaggatttaaccgccagctccggaaagtcaccaaatccaagacggtatttccatccgatgacagtctcttgaaaatgctgtatctggccatgatagatatcaccaagaaatggacgggacaccgtcaggattggggacagatccattctcagctggaaattttcttcgaagaaagattggaaaggttataagcagaatgcatgctaggcagggctggcacagccagtcctgcttgacatgccttaaaactgcattataatacaaacaaggacagaaccctgaaaaacaggttctgtcctcgataactaatgacatatcttatatcagttttttctgtttacacaaaacttgaaacgctctcgattgttactgaatagaaatactctcccggccatcatggtctctgtattttgcttccagcgtaccgccattcgccagaatatcgattacctcaaacagcttatcaagatttttattttgctttttggcaagcttcaaatcctttttaaattgagtggtaaactgaatatcgtatttcatacgtcgagaactgccttaagtgcatccatactggaataacgcggagcagaaggatccttcatcatttttctgccttcctcaatggcagcggccgtagtatcattcggtacttccagttttaattcaaaaggaataccatgctcacggatagcggttctcaggaacatatttacagcagttgtcatattcagaccaagctcattgaagatttcctccgcctgatccttgattgccttgtctgtacgaatatttaaattagttgttgccatacaaaacacctccattcaagtatagtatactcagaaatgcgcctgatgtcaacacattgtcattatataagatgcataatgtgcttctggtcatcatcaaactcgaacagaagcgcaaatgctgcaagatccagatctccgtcatagccgggacatgaaaaagaaaatatttgcgattgcaaattttcgctgaatgttaacgttcaaaatattgctgctcagtgaaaaacgtgatatgattagaaatagattttgtaacacctttcatgagcttgctggagaattaaaaacatacataccggatggaacaattatttgtttatgaaacacagggaacagtgatgaatgcttttttccggcattacttgactatgaagatttctcatattcccaaacagggacaagtctatgaagagtttaagttgcatcatttaaactgtgaattcaatggtcaagaccgtgatatggatgtcatttttgccacagattgcatctgtttgaaactgtgaatgcgcgatatcagaggtgtggatatgtttccgttttgacaggatatgtttccgcgaacgggcacagaatcagaaggtatcgtgccatgtggaatgtatcgtgtcgatagtgaaaaaagaaaaataaaggaaagtagagggaggaagatctggaaagattctcctccttttttagaagtaaggagaaaatcatgaagaatcatatagaaatcacaaatttcaatgatcccaacctggatctgtatgcgcacctgtcggaggtacaattgctgcggtatgcggagccgaagcaggggatttttgttgcggagagtccgaaggtaatcggacgggctctgcaggcggggtatgaaccgatatctttcttgctggcgcatcaggatctggaccgggaagcggtggagattctggaacagtgggaggatattccagtctatacggcagaggatgcggtgttacggaaattgaccggatttgccatgacgagagggatgctgtgtgcgatgagacggcgagaacttccttcagtggaagaaatctgccgtggagcaaggcgtatcgcggttctggaaaatgttgtgaatccgacgaatgtgggggctatctttcgttcggcggcggcgcttcatatggatgcggtacttttgacaggaggatgcagtgatccgctttatcgtcgggcagccagagtcagtatggggacggtgtttcagattccgtggacgtattttgataaaaaaacagtctggccgtcacaggggatggcgcagttacagaacatcggttttaaaacggtggcgatggctcttcggaatgattcggtggagatcgatgatcctgaactgaaaaggcagaaaaaactggcgatcattctcggaacagaaggtgaagggcttctggcagagacgatggaagcgtgtgattataccgtgaagatcccgatgagccacggtgtggattctctgaatgtggcagcagcgagtgcggtggcgttctgggagcttggaagatgaaattaggtagaaagatatagaaaagatatagtacaatataaaaaggcgttgatgggtggaaaagacgcagtctcttttccataagacgttaaagggtgattatgaagattgtgaaaatgtaagcagcaaaggaagtacgaagcattgttgtaaaccaggaggaaaaacggtggagaaacaggaattgcatatagattttaaagtggcaaaagcagcttttgaaaagtatctggatgagtatgacagaacagatgacaagattcatctgaaaatcgtacatacctattgtgtggtggatgccgcagaggagattgctacccggatgcatctgagagaggaagacgttcagctggccaagatcattggcctgcttcatgatataggaagatttgagcagatcaaacgatttcacagctttgagccggggactatggatcatgcgatgtacggagcagatcttctttttggaccggagcagatgattcgttggtttgtaaaagatccgtcctttgatcagctgatctgtgtggcaatcgcaaaacacagtgactttaagctggaaggtatagaagatgaacggacattgctgcatgccagactgatcagggatgcggataagctggataactgcagagtaaaactggaagaatccatggaaacacttctggatatggatgaaaagacagtgggcgcaagccccatatccccaaaggtgtgggagtcctgcaaggcagaagaatctgtcctctccgcagatcgaaaaaccggaatggattactggatgtcgtatcttgctttgtacttcgacattaattttccggagacttatcagatcataaaggagcaggattatatccggcggatcgcagaacgggtaccctacagcagggaggatacaaaggaaaaagttgcgtatacagtaaaaaaactggaagaaaagatgaatattcaaccgtgaagctgccggtactgagagggcgataatccaaagtgctttttaaaagccttgctcagatgaaattcatcgcagaagccatagttgatggcagcttcccgcagcttggtatccggctgggtaagcagaaactgccggaccatttccagttttgtttccatctggaaagcaggaaaggtttttttacaatacttatgaaatcgattgtttaaggtacgttcgcagatataataccgggaagctatttctccagcagtaaagaaagtctgtggcgtggaatgaatcagcctgataatctcttcaatcatgggatcgatgggagtcaggctgcttttttgtgcttccagccgagaaagttcacacagaaaaagagagaacagaagggaaagtctgttttcgcgttccggatcgtgactccaggagacagagatgatctcttgcatatattgacggacttttggattatgttgacagtggagaaggctggaacaggaaaaaagctggaaagcttccgaaggattcactgcagatgggtatagatggttatatttcttttcaacatcggtaggcagtgcatgaacatacatgtggcggttacccgggttacacagcttttttccgtagtgatgtcttccggcagtgagaatcagaagatcgtcgctttgcagagcgtaggaagtatcatcctcccagatttcccaggtaccgtccaggatatataaaaaatcatgttcgccgatgattcggttaggatgcaccataccatggacagaggttacatagtttccgctggtaatggtatgcattttcattttctcaagatataacatggtaccacctttccaatttatacatgccggtttccatccgggcaatgttataaaattgatcgttgtattagtataatgccaggtactgaacagttacaaagtcaaaaataagtaactgcgacgatactgacagttacgaaataataaaaatccgtatcataagtataatcggaaacaggaggtaatgcaaatggagaaaaatatgtattctcgtccgctgtcactgcgcagcatgaagatcaatgacaaattctggaagcaggagatggaagtagtacgtaaggaagtgattccgtatcagtgggcagccctgaatgaccaggtggagggagcagctcccagtttctgtatgcgaaactttaaagtagcgggaaaacagaataaagagagaaaagagcagggcaaagcttttatagaaccaaaatatacattccgtggatttgaatcattaccggaagatccaaatcatccggaagataagttttatggttttgtattccaggattcagatttttccaaatggatcgaagcagtcggttattctctgacccagcatccggatcctaaactggaggcaatcgcagacggagccatcgatatcgtgtgtgcagctcagcaggatgacggatatctggatacttattatattatcaacggaaaagataagattttcacaaatctgaaggatcatcatgaactgtattgtatgggtcatctgatcgagggagccgttgcatattatgaagctaccggaaaagacaaattgttgaaagcagcagctcgttttgcagattatgcagcagctcattttggtccggaagaaggaaaatgcaagggatatccgggacatgagattgcagagatggcactggtacgtctctatgaggtgacaaaagagccaagatatctggaattgagcaagttttttatcgatgagcgtgggaaacgaccttattattttgataaagagcatccggaagaagtgaaaaaaggccatgaaaacgacctgcgttatttttataaccaggctcatctgccggtacgccagcaggatgaagcagtaggtcacgcagtacgtgccgtatacctgtattctggtatggcagatattgcaagactgacagaagatgaaaccttgtatcaatcctgtgaaaaactctgggacagtatggcaaatgaaaaaatgtatattaccggaggcatcggtggtacacagatcggtgaggcattttcttatccatatgacctgccaaatgatactgcatatgcagaaacctgtgcttccatcggtctggttttctttgcaagaagaatgcttgagatcaagccggatgcaaaatatgccaatgttatggaaagagctttgtataatggaattctaagtggaatggctctggacggaaagagtttcttctatgtaaatcctctggaagttctgccggaggccagccacaaagatgagagaaaattccatgtaaaaccggttcgacagaaatggtttggatgtgcatgctgtccgccgaacttggctcgtctggtaagttctatcggttcttatgcatatacagagaaagaggatactttatttgtacatctttatatgggcagtgaactgaccaaaaaggtggaagataaggatgcgaatgtagcaattacttcggaactgccatgggatggaaatgtggagatcgctgtggaagcaaaggatacagattttgtactggcacttcgtattccggactggtgtggtggaaattatactgtagatggcattgagaaggatgaaatgtctgaaaaggacggttatctgtatgtgaagaaagtctggagtgaaaaagatgttctgaaacttcatttttccatgccgctgcttttgatggaggcagatgagaaggtacgtgaggatgcaggaaaagttgcagtattgcgtggaccgatcgtgtactgtctggaagaagtggataatggtaaggatctgcatcttttagaagtgaatccggatggtaagtatgagatcaaggacagtgagatctgtggtaatccggtgaaagttgtggagatggatgggttccgtgttgtggatacagcgaaaaaggatggagaactgtatcatgtgtataagagaaaggagaaggaagctgttgaactgaagtttgttccttattatacctgggcaaacagaggggagaatgagatggaagtctggattcggatataaagaattgcggagaaaagcagagattttttgggaaaagaagagttgacttattttttgactttgttatacttacatgtgacagagtttttcagtgccccaagggaacagctgtgactgcggggataatagggaatcaggtgaaagtcctgagcgatccggtcactgtaaacagggagtgttgtcataggataccattgcatagagaggatatgtgagaaggtttggcaagacaatgatctgtaagccaggaaacctgctgaaaaagttggtgatgagcttccgaagaaagcagaactccaaaagatcgaaaagcatttttatgtttttccgtctgagacaggaaatggtatacctgcagttgtatctgacttttgagaaagatatgactgcagtttttttgggaaaacttataactgacaggtttacggccgcttctcttttgaccgtcacagatgatatatgaaaagaaagggaatgtaggatgaaaggaacaggaaagagagtactttctgtatccctggcagtcatgatggcacttggtatgccgtcaggtacctttgcagctgctccggacgcggaagcgttcgaacagacgagtgaagcggaagttccggttgcagagccggagacaactgcggaagtcacacaacaggcagcacagataacagagaatgcagagacaacgaaagaacctgtaacagaagaaattacacaggaagaacaggtaacggaaagtaaacaggaaaaagcagaggaagtagccggagaagtttcagaaacaaaagacaacgcagcggaggcagaaacgccaaacgagttaccggatctgaaagtgaccaaaacagaactgattgaaaccaaagaggaatatctggtgacagtttatacggacagcacggtttatgatcagttatatgtgggaaaaaaagaagatacagagaaaacaccggtagtggaaggaaagaaaagtccgaatggacagtatatcttccagtttgcggtcagtgaggagaaactgggaagtaaattacagattgtgccgggagtgaaagcctccggtgagtggtatacaaaagaagatgttttctgccaggttccggaaaaaacacagcatgtgtctgaaaatgaaaagacagaggatacaaagactgtggtacaggaagatacacaaaaagaagaggaaaaacctgcggttgcatcagagaacaacagtacagcagaaaatgtaatcaaggcggtgtatgccacagaagccggaggtaacaacgccggaaaagattaccgcatgctcaaaatcgtaaaatccagtgcgaagctgaacgcggatcagatcgatatcgagatctatgtaagtccggccagcaacggaagttttacttatgatgcactgtatatcggaagatgggatgatgagactaaagaacctctggtaatgggcgaagtggataccgagctgaatctggagaaattcgcgttcagcgtaccggcagagaaaaatggtcaggaagtcatctttgtaccaagaaacggaagaacacagaagttcagttccagtaaaattgcactgaaactgccgacactgggaagcactgatacagatccggaaccgaccacggcaccatccgtaccggacggaagcaaagtggaaaacagtatcacagcagaaaaagcagacggatctgcatttacgatgttcaatgtggaaaaatccaccgcaacagtgcatggagaaaacattaatattgaactgtacctgaaagcgaatgcatccggaaagttctcatacaccggtatttacctgggaagtaaagaagatgaagagaaaacaccggtcattgagggaacgatcaacgaggataacaatcaggtatacaaattcagcattccgctgagcaaagcaggaacaaaattacagtttgtaccgatcaaagcaaacggaacattcttcagcagagcagacctgtatctgacgattccggagttcaaagataacggggaaaacccggagccgaccacggaaccgaccgaaacaccggatccggatgtgacaccgtcagatacctccaaagcacaggtgatcaaagcggacggaacagaattcgggatgttccagatctcaacctttgaggcaaaggtgaatggagataagatcgatctgaccgtggagaccacaaacaaatcgtttgacaagctgtatcttggtaaaaacagtgatgaaaacaagacaccggtgatcagcggaacacaggacaacggggtatggagattcagcttcagcgtggataagagcctgacaggaaaagccattccggttgttctcggaaaaccgaacggtaactggtacagcaatcagcagttgtatctggttgtgccggaagtaaagggaagcgaagatgttgaactgccggaggcaggtgtaaccgtagaacagggcggtactgcggcaacattaaacggatttaaggtagtaagttcttctgcgaaactctccggcgatcaggtaaccgttacatttaccgtagacggaacgatctatgacagaatttatcttggaaagaaagatgacagcaccaaagaaccggtggtacagggaacacagaaagatgaccagaccacatttaccttccaggtatctgcagatcagcagggaatttgtgttccgatcacgccgggacgtaccaacggaggctggctgaacagtggaagaaacctgtttatcaagattccgaacgtaggaaaaaccttcgatgcggcaacttatccgaacggaatctatgacgcttatggcaatgctcatacacagaatagtgtatttaatatcgaggatgacagtacgatcacagtaaagggagatgaagtcacagttaccctgtactccggatctacttcctacgataaaatgtatatcggcaaagttggtgacagtgatgaagctaaagatgcaaatgcagtagaaggaaaacttctgggagaatcggatccgagtcgtccggaatatcgggtatacactttttcactgaaaaaatcacagctgggaacaaaagttccgtttgtattacataacgcaaaaggaactgctaaatggctgacaaaacaggattacctggaaatcccacagtttatgacaaaaatcggggaaattccggaagatcttacctatcgcaaagcgaatattacgaataaggccaaagactttatcatcaatggagaaaagagttattatactgttaccagtggtgctttaggtcatttggtaattgccacagacagtactgattataacagaatgtacctgggaaccagagaagaaattagtcaggcaatcaagagtggaaatggtggaaactatctgtcactctggaaattagataatgaatcctatggattcatacatgatggatttaccaatgagattacaggaaagacaatgtcttatgttctttatagcacaaagaccggaaaatggtcagaaggcacatatacgctgacaattccttctccgggtgaaatgacagaggcttgtacggatgtaggtgaagtcattagtccggtagaaagctataatgatccgtataaggatgcaaaagcaccggatattgatacaaaaccaactgaaacacctacaccggccccatctaacgttccgtcagacggtatctacagcacaaccgccgagaccggagcatcgatgttcaaagtggtcggagtcaaactgactgtaaaaaatggtaagatgagcgcagtcatcacattaagtggtgaaggttacgattatctgtacatgggaaccgctacagatgctgcaacgcatacaggtaactggatcaaatacagcggatcggctgcttacacactggacggggagacaaagaccggaagaacttatgagattccggtatccgcattggatacaccgcttaccatagcgtctcattccgaacgtcagaagaaatggtatgacagaactgtcacgatcagttccaaaaatctgaaaaagacgggagatattccggcagagggaacaccggcagatggtatctacagcacaagcgcagtaaccggggcagcgatgttcaaagtcgttggaacgaagttgaccgtaaaaaatggtaaaatgacagcattgatcacgttaagtggtatcggttacgattatctgtatatgggaaccggagcagatgcagcaaatcatacagaccagtggatcaaatataaaggaacggctacttatacactggatggagaaacaaaaacaggaagaacgtatgagattccggtagctgcactggacaaaccaattaccgtagcttcccattctgaaagccataagaaatggtatgacagaacaattacattcagttccaaagatctgaaaaaaatcggtgatgtatctaccggtggtaatggaaacagtggaagtacggataacggtacaaccggtggaaatggcagtacaaatggaagtaacaacacaaccggaaatactaccacaaaagtggacacaaaaccggataccgaatccaagtatgaatccgataccagcggttccacaaaagccgtaaacagcaagacaaaactgaaagacggcgtatataaaccggacaaattcagctggtccggcggtagcggaagggtaaatatcacctgtgataaagtaacgataaaaaatggacaggcactggctacaattgtattcagcagttctgcttatcagtatgtaaaagcaaacggcaaaaaatatctgccaacccataccggcggaaaatccatttttgtcattccggtggaactgaacaagaacaacagtatcatcggtatgactaccaagatgagtacggcgcatgagattacctacagtatcctggtttatctgtcagcagcggatgaagccggtgacggaagtgtatctgctgatggaagcagcagcggacggaatttcggaagtaatgaaaaactggatgaaaaagcaccggatatcatcggtctggaatacaaatcagaaacaaaactggactatgcgaaatatttcaaaatctatcactatgataaggatgtaacactcctggaaattgatataacaaaagatacagacaaagatccggagaaactgaaagaagaaaccgcgacaaaagattctgaaaaaacaagtacaaaaactgacagcaagaaaaacaataagagtggcaaaaagaaagctgtaaagatagcaatcaaaagagataatgaagacagtaagaaatcagatacacagagtattacctataacgatgagggagaggcagttgtacagacacaggaagaaattattgcagatctgtataaggcaaatgttgtcaaatacctgatcgttccggaagattctgatgtggaactgccggttggaatcgaaaaagaaatgatcgtcatccatctgccggtgaaacatgcgtatgtggattccgaggagtcgctgaataccatggatgacctgaaacttctgaaaaagattgcagcagttggatatgatcaggatgagacagatatcgaagcagtcaacaaagcactggaaaaagaagatatggtctatgcaggatcggcagacgatctgaagtttagagaaatcgtaaaaaataagattgatcttgcaattgtatcctctgagattctgccgggaagcgagacagagaaagcagtaaaagaagggaaagatggtaagacaacaaagacagacagcaccgataagaaaactgtggatactacaaaaaagaaagacagtaagacggtaaacgatgttactggtgatagcgaaacagaagccacctctgtactggatgatctggcagataactttgcaactctgggaataccgctgatcatcgaccgttctgcagatgaaaaatctgaactcgcaaaagcagaatggctgaaagtatacggggccgtattcggatgcagcaagaagaccgatcaattatataataaagcggtaaaagctgtgaagagtaagacaaagtaaatttcaataaatagtcaccaagaaaaacataaaaaaacgaattaccggaagcggtgagccttttcgaatgaaggctgaccgttttccggtaatcgtacataatcgaggaaaaaagatgagaaaaaaaacatataccgcatgcagccgtatggcagccattttccttgcggcagtcctgatgctgacaggttgcggaactggtgcaggagagagcagttccacaggttctaaagaaacacagacaacagaggcagatgataccaaaacagagggacagcaggaaaacgatacggcagatacagaagaaacagacgaaacagatgatgccaaagaaacagagagtacatctgacagcgaaacatcttatctgacagatgctccggatgctccggaagtttccggtctgaactgtcagggaaaactgaaactggactatgcggagtgctatgatgtctactattatgagaatgattatcagctgatcgatgtacatgacagtgctcagtatcttctggtgcctgagggagcggaggctcccgaaggtctggatgacagtatcatcgtgctgcagaaaccattggataagatttatctggcagccagctccactatggcgcttttccgtgcattggattccatggataacatcaagatgagtggaatcgacgcttccggttggtatattgaagaggcaaaacaggccatggaagacggtaagatccagtttgcaggaaaatacagcgagccggattatgagatgctggtagatcaggattgcgatgtggctattgaatccactatgattctccacacaccgaaagtacaggagatgatcgaagacctggatattccggtatttatcgaccgctccagctacgagacccatcctctggcaagaacagaatggatcaagctgtatggcgctatgttagataaggaagaagaggcatatagcttctttgatgaacaggccaaggtaatcggcgacctgaaagactttaaaaatacggaaaagacggtggcatttttctttgtaagtacggacggttctattgtagtgagaagaacccaggattatattccaagcatgatcgagctggcaggcggaagatacgtattccaggatctggacagtgtggagacaaccagtgcttccgtatccatgagcatggaggaattctatgcagctgcagcagatgcagattatctggtatacaatgccactattgacaatcccatccagtccgtagacgaactggttgcaaaaaacgaattgtttgaggacttcaaagctgttcaggaaggcaatgtatggtgtgtaggaaaatatatgtatcaggcaacggatatcgttggtcagctgatcacagattttcatctgatgttaaccgacggagatgagaaagacatgacattccttactaaagtaagtgataagtaacaggagaaatcatgaaaaaacgaaaagaagcccttcagggggcaaccgattttcattatgaaaattttctgcgcagaagccggtatacatcggtatttctcgtactgctggcggcattctgcgtgatcactgttttgaatatcaataccggaaatgtggatatctctatcccaaagattttaaagattatttttcttcgggaaggaaataagatggaatataacattatctggaagatccgtctgccaagaattctgatggcggccatccttgggggagcactttctctttccggatttttattacagaccttctttgaaaatcctattgcaggtccctttgtgctcggtatttcctccggagccaaaatggtggtagctctggcgatgatttattttctgggacggtttcaggtggtatcttcttatacgctgatcatagcagcctttatcggttcactgatcgccacaggttttatccttctggtgtccagacggatcaatcatatggcaacacttttagtagcaggtatcatgatcggttatatctgttcagcggtcacggattttgtggtgacttttgcagaggactcagacattgtcaacctgcacggatggagccagggaagcttttcaggtatgaactggagcaatgtgaaggtggcggcagttgtcatcggagtgacgatccttattacatttttcatgtccaagccgatcggagcttaccagctgggagaagcatatgcccagagtatgggtgtgaatattcgctttttcaggattatgctgatactgacttccagtgtgctttctgcatgtgtgactgcatttgccggaccgatttctttcgtgggaatcgctgttccctatctgataaagagaagtcttggaacttcccggccactgatcgtcattcctgccacatttttgggtggcggtgtcttctgtatgatgtgtgatctgatcgcgcgtatggcatttgcaccgctggaactgaatatcagtaccgtgacttcgatatttggtgcgccggtggttattttcatgatgttgcaccggaagaaaggaaactgacatgggagaatattattttcatctggatcagctgacggtgggatacaacggaaagcctctgattgatcagattcaggtaggtatccataaaggagagattgtcacactgatcggaccgaacggatccggaaaatcaacaattttaaagagtatcaccagacagctgaagatacttggcggtaaggttctgtatgaggagaatgatctgcacaagctttcttacaaggaactttccaccagaatggcagtagttctgacagagcgcatgcggccggagctgatgacctgtcatgatattgtggcaaccggtcgctatccttatacgggtcgcctgggcatcttaagccgagaagacgaggataaagtggatgaggccatgcggatcgtccatgcggaagaactgggaagccgggattttaatgccatcagtgacgggcagcgccagagagtccttctggcaagagctatctgccaggaaccggagatcatcgtgctggatgagcctacctcttttctggatatccgtcataagctggaactgttatccattctacgctctatggcaaaagaaaagggcataaccgtgatcatgtcccttcatgagatcgatctggcccagaagattgcagatcagatcctttgtgtaaaaggagatcatgtctgctattacggaactccggaacagatctttgaagaacagaccatccgggaattatacggaatcgaaaacggattctatgatcccagatttggcagtattgagcttccaaaggttgatggagagccggaggtcttcgtgatcgccggatgcggaaggggaatacccatctacagaaaattacaaaaggataatatcccttttgcaacaggcatcctgtacaccaacgatgtggattatcagttagcccgcctgctagctgccagggtgatcacagaggaacctttttgccagattactcaggagcatctccgggaagcaatacaggttatggaaaactgtaaaaaggtgatctgcgccgatgttcccatcggagaatgcaacaaagggctggaggaactgatccgggccgcaaaaaagagaatgtaagagaagaaagatcctgatgaaatctattttcaccgggatctttttgttgcattgcatatcaataattggtccggtggaccaattttgattgctgttcgcgggtgtctgttatgacttgagatatagagagaagatacggtataatgtatatacttaaagtaactgtgtgacgtatagcagttaccatgcagtcattaagcaagggcaaaagtccttagcattatcaggagaggaattctacaaatcagatgaatgaaaaaacagaaaaaatcaaaaaaatccggaatctgctccttgccggtggttgtataatcactgccataatatgccgtcatcttccagccaacagagaatcgggctggttggccttttttcagctgacgagggcatacttgtatatcaccttatattgtgtctggggaatttcccttcagcgaaggatcgtcaacaggacagcacgaagatgcctgtgtggtattgcatctcttatggttttctggtttgttatccgtactctgaaatacaatgtattttatgaaccggtattgcggcgttacagttggtatggatattatgtcccgctactggctattccatctctgagtgtgattgtggcattgaagatgagagaaagtgaaaatcaaaagaggagacaatggaccggtattttcctggtgatcacagtgggcgtgatcctgcttgttatgaccaacgatcttcatcagctggtatttcgctttcctgcagaaaagccatggacagatgatgagtatttttatggtccgggatttgtgctttgtgtggcatggatcgctatcggttttcttattatgctgggcatattaatcgcaaaatgcagaaaccccgggaaaaagaaaatatggcttccttttgtgccattaggactgttttttatctggtgcattgccaatattttccgtatcccacatctgaagatcattgcgggagatatggcggcggcctgttgccttttgatcgccgctctttttgaaagctgtatccagtgtggtctgattctggtaaataaccgatacggagaattgtttcaggcttccagaggaatcaatgcacagatcagtgaccggaatctgaacatccgttatacaaccggtgacggaatcgagctggataaagaagagatgaaagaagcactggagaatccgggatatgaaaaagaagggatccgtctgaacagtatccctatcaatggagggtatgctttctggatcgaagatatccgtcagcatcgagctgcttatgaaagtctctatgagcttcgcgaagaactgagggatcgaaaccagcttttgaaactggaatatcaaaaagaaaaagagagaaaacaggcagaagaaaagaaccggctttacgatctgatgcaaaagcagacggcagaacaatttcagcagatcgccggatatgtggatcagctggaacagtgtacggatcatagggaatatcacagacttctggggaaaatcctgatcgtagggtcctatctgaaaagaaggaagaatctgacactttccgcactggaaggtaaggaattaaaggaagaagaactgatccagagcctgcgggaatcctgcagtaatctggtcttttgtgagattcaaggacagtattatatagaaaccggcaaagaaactttaccggcacaacttgtcttgagagcttatgatttctttgagcagatcgtagaactgcttctgaaacagggaggctcttttttctatcggctgacagaactgaatggtgcccttcgaatctcggtgaacctggagggtgattgtcagacggagagtctgcaagaaaaatatcctttgttacatatggaacaggaagaagaaaaagaatggtttctggctttgcaactgtcagagaaaggaggcaacgatgaaatcctttgaaacatccggtatgtttgtccaggaaatgattctggttgcgttttttcttctgatcctggtggagatcaggctgttgtgtattcaacattccagaaagcggaaagtagaggttatggctgtcaattttcttttgctgagtgtcacctatggaattcttacggatctgctgagtgattatctggctatttgggaagggaaaaacaagcttctacatattgcagccggttggcctgcagaaatccttttttttctcatttttgcagataccggttatctgatttgtcgtatccggcgcgaagatgaaaaatacaaaaaagaattgtctgtatactccatcaaacagaccctggatcatctgaagtgcggaatctgtttttgtgatggcatcggacagatcgtattatgtaatgagaaaatgtaccagttaggctatatgcttaccggggagaatctgcaaagttatctgcttttaaaagaagcactggaggcaaaacaatattccaacggaatctcaaaagtagggaaaaagaaaaatctgtattattttccgaatggtaccgtatgggattttcgccaggaaaaactggaggatcccagtctgcaggggtatatacaggtgctggcattggatgtgaccaatctttattttaacagtgagaagattcagaaaagcaatgaagaacttatccggctgaataaagaaataagaaaaatgtatgaatgcatcgatgatcagatcagggaagaggaaactctggctatgaagatccgtatccatgacagcttcggacgaagcctgctggcggtccggcagcttctggaagaggaagcggaaccggagaaaatgaaagggcagttaaagaccataaggcagacggcacagattttgctgggaaatatggaggaagtacaggacgagaataaagagtccatcacagaaaaggcagaaaagcttggaatcactgtatttgtcaccggaagcatgccggaggaagaatatcagaagttattgatcgaccaggcgattatggaatgtatgaccaactgtgcaaggcacgccggtggaaccagggtgtttgtaaagataacaaacaataaagtgctttgtaaggtacagatcaccaacaatggaaagaaacccgcagaaggatcccaggagggcggaggactgacatctcttagaaaaacagtggagcgggaaggaggaaagatgcaggtgatcttttcgcctgagtttgaactgattctgttactgtctcatgaaaaagacagagagatcaaaagttcagaggaagtaactgtgaagatactgaacagttaaaagaagaataaaaagggaagtgatgaaaaatgaaaatacgagtgttacttgtggaagaccagaagattatgcagaagtatttcgccagcatggtgcagggggatgaaagattcttgttggtggacgttctgaacgacggagaaaaggctgtttcttactgtaatcatacggtggtggatcttgtcctgatggacgtccagaccttccagaaccatgacggattgctggctgcagaaactatcaaaaaacaacatccggcagtgaagatcatcgtgatcacatctctggtggatccggagatccttacacgggcaaaagagaagggcgcagacagtctgtggtataaggatcacggacaggaagaaattatggaggtgatcgaccggactttggagggagaacatgtctttccggacaaggcgccggccgtggaactgaagtggatgaaaagcgatgagatcagtccccggcagctggagatgctgagactgtatatcaaaggctattcctattcggagattgggaaacagatgaactgttcggcagcaggagttcgatggaattttcaggatatgatagcaaaagccggctattcctgtaaggaagaattactggccgcagtgctggaaagtaagctggtcgtaagcacattgaaagattggcagacattataaaatatcaagaagtatttcatttgctatcacaagtgttagtgactgacaataagatatctgtaataataatattacaaaaaaaggaaaagatgtaattgtcagtagccactgttttgcaaggtgttttggtatgactatgccaggatcccgagatatacaagccaaaatgcgtcaccgaaggtgattttacatgcattttggctcgtgactgtgaaggcactgaacagttacgaaaaactatgtataaagaagggagaaaatcgtatgggacttataaaagcagctatgggcgcagcaggcggcgtaatggcagatcagtggaaggagtttttctactgcgattccatggataaagatgtaatggtaaaaaagggacagaaacgtgtttcaggaagatcctccaacacaaaaggcagcgataacattattacaaacggaagtggaatcgctgttgcagacggtcagtgtatgattatcgtagaacagggtaaaattgtcgaagtttgtgcagaaccgggacagtttacctttgattcttccacagagccatctatttttaccggcagtcttggatcaagtatcgaagcaaccttcgcaaccatcggaaaacgattcacctatggcggagataccggaaaagatcagagagtatattatttcaatacaaaagagctgatcgataacaagttcggaacaccgaatccgattccgttccgtgtagtagattccaagatcggactggatgtggacgtggcagtacgttgctccggtgtatattcttaccgtatcgcggatccgcttctgttctacagcaacgtatgtggaaacgtagaagacgaatatcgaagagaagagctggaaagtcagctgaaaacagaatttatcagtgcacttcagccggcatttggaaaattatctgatctggaattacgtccgaatcagatcgtcactcataatacagaattggaaaatgccatgaatgaatctctgtccgccaagtggggacagcttcgtggtctgcaggtagtaagtatcgctctgggttccgtaactttaccggaagaagatgcggagatgatcaaacaggcacagcgtaccgcgatcatgagagatcctaccatggcagcagctactatggttggagtacaggcagacgccatgaaagcagcagcatccaatgaagcaggtgcaatgacagggtttatgggaatgggcatggccatgaacgcaggaggcggcggtatgaatccgcagaatctgttcgctatgggtcagcagcaggaagaagccagacgtcaggaagaagcacagaaaaaagcccaggaagaagagatccgcagacaggtagaagaaagactccgtgcagaagcagcgcagcagcaggcagcagctgcagcggcagcaccggtaacaacacctgcagcagacacctggacctgcagctgtggaaatgtagtaagcggaaagttctgtccggaatgtggttccaagaaaccggaaccaaaacctgtagaaggatggaaatgtgtatgtggcaatattgccacaggaaaattctgtccggaatgcggagcaccgaagccggcagaagaaaaaccagcagaaccgaaaggatggacctgttcttgcggaactgtcaatcagggcaaattctgtatgaactgtggagcaaaaaaaccggcggatgcaccgttatatcgctgtgataaatgtggatggaccccggaagatccgaaaaatccaccgcgtttttgtccagaatgcggagatccttttaacgaatctgatattcagtaatccggaagggaggaagaggtatgggtttatttgataaaaaagtatgtgatatctgtggtgagaagattggtctgttaggaaacagaaaactggatgacggcaatctgtgtaaggattgtgcaaaaaaactgtctccctggtttgaggagcgtcgccacagtacagtagaagatattaagaaacagctggcatacagagaacagaacaaagaggcagttcgtaatttccgtgtgaccagagatctgaaagcagataataattaccatgtatttattgatgataaccatcagaaatttgcgattggcaccaagatggatgtagagaccaatccggatattctggatctttctcaggttacaagctgtcgcatggatgtggaacaggatcgtacagaagaacagtatcgggatcagaatggcgagatgagagattatgtgcctccaagatacaaatattcttacaaatataaaatgatgatcggtatcaacagcccctggtttgacgatatggatttccagttacataatttcgatatcgatgcaaatgaccgtggaaagatcatggcagtagagcagatcggtaatcagatcatcgcagcactctccggcggcaatatggcaggcaacatgaacaccggaatgtacggtcagcagccgggaatgatgggaaataccccaatgcacggcaatcagcagcccggtatgatgaatcagggcgcatatggccaacagggcaatatgaatgccggtatgtatggccagcaggcaggcatgatgaaccagggagcatacggccagcagccgggcatgatgaatcagggagcatacggccagcagccgggcatgatgaaccagggagcatacggccagcagccgggcatgatgaatcagggcatgtatggccagcagccgggcatgatgaaccagggaatgtatggccagcagccaggaatgatgaatcagggcaactatgatccgcgagcaggcgttccaaatcaggattacagccagcctgtacagggaaatcctgcagcagccggtggtgcctgggtatgcagctgtggcgcatccaacacaggaagattctgcgaattctgtggacagccaaaaccaaatcagtaatctaagcctgtgtgtctgtccgcattatatgcggtcgacattatacaaaaatatctgagctactgtccccggaaaactttttcggggacagagcgtaaaaaggagggagagggtgagctatggcagatatgatggagtacaaatgcccttcttgtggcggagccatggagtttgacagtacgactcagaaaatgaaatgtccctactgtgatacggaaatggaagtagcccagtatcagcagatgcaggagaaagccgaaggaaatgccggtggcaatcagggtggcgatgccggaggaaacaatgaaaactggtctgatatgggcaacaatcaatggatggaaggcgagacagacggaatccgggtctatgtctgtcagtcctgtggaggagagatcgttgcagatgccaataccggcgcaacaagctgtccgttctgtggaaacagggttgtcatgaaaggacagtttgccggagatctgaaaccggattatatcattccgtttaagaaagataaaaaagcggcaaaggcagcttatttcaaccatctgaaagggaaaaaataccttccaaaggtatttaaaaaagaaaatcatgtggatgagatgaaaggtgtctatgttcctttctggatctttgacgtagatgcggaaggaagtgtcgcatataacggtgagcgtatcaccaagtggagaaatggagacacagagtacacaaaaaccgaaatgtattctatgcagcgtggaggaaatctgagtttcgcccgcgttccggcagacggatccaggaaaatggatgatactttgatggaatccatagagccttttgaattccgtgaggcggttccttttcaggcggcttaccttgcgggatatatggcagatcgatacgatatggacatggaagaacgtatggaacgtgccagggagcgagtgaaaaaagctacagaagatgcatttcgaaagaccctgcctcatatggaccgtgtgacggtggccagcagtaatgtaaatgtatgcaatgccagatactggtatgtactgtatccggtatggatcctgaacaccacctggaatggtgaaaaatttaccttcgctatgaacggacagagcggaaaactggtaggcaacctgccgatggacaaaaagaagttctggatcggcgtatcggttcgcggcggtatcatcggacttgtgatctatttgttactttggatcattgcactgatgtaagaaggagggtgagaatatgaagcacaaattaaaaattacgatactctccattttattcggattgctcttcggcatacctgtatatgcagacagtaatacctatatcattgatcagagcgatgtgctgggggaatatatttcgacgctgaacgaaaaagcagaaacaatatcggaagaagcgggacttcgcattacctgtatgatcactaacaccacggagggcatgggaactccggcggtatctgagcaggtgtacaagggactgtttgccgatgatccgggctttatgctgatctacagtatcgatgatcaggaatggtttatctacagctcaggaatggagtcagctccactgacggaggaacaggaaaatgaactctggaacgaatttgccattcaggattattatgtggattgtgtagatgcttatctggatgcggcagctgctatctgcaacgtggattctcagggagtggcagaaccggctgctacagacagccagggcgatgaccagacggcaggtgccgatacttcggaaactacagaagcttccggttcgagcactcaggaagccggcagcgcgattccgcaagaaagacagcttccgctgcttgtagatgatgcaggtctgctgactgaggaagaagcagatgctctgctggataaactggagaaaatcagtgaaagacaggaatgtgaagtggcagtagtcaccgtggattccctggaaggaaagacttcacaggattatgcggacgatttctatgattataacggctacggatacggaaaagacgatgacggtatcctgttgctgatcagtatggaagacagagactatgctatcactacttatggttttggtatcacagcatttaccgatgcaggtctgcaatatgtggtaaatgatttcaaacctgccttaagtggcggaaggtatggagatgccttcaacgactttgcagactgctgtgataagttcctcacccaggcccatacgggagaaccatatgatggggataatatgccaaaagggacagtccatcccgtatatatccccatctcccttttatttggtttcctgatttctttactgataggaagatcgaagagtgcaaaactgaaaagtgtacggaaaaaagaatcagcagcggattaccaggtggcaggaagtatgcgcctgtatcagaattcggatgtgctggttgcatccaacgtgacatccagagtggtatccagctccagcggaagttcatccggcggaagctccacacacacaagctcttccggaagaagccacggaggaacatccggaaagttctgatggatggaaacaatcgacagccaatatgaaaaaggaaaaagacgaatcatacattttcagtagattcgtcttttttgtgcgtgcagattgcgggaatgatttttcagacacgctctaaagtacgtacatctggataaacatttggtgtgtatgataatacaggcatttaccaatggatcattgggaaagctgtaagagaaaaaagtagcagagaaatgcacagagcgtttgacagtaatgccgggaaagggtagaataaaatgatgtgtggttaagagaatagtacttcacaaacatggaagaaatggagaaaaaattatggcatattatctcgtagattatgaaaatgtaaaagctgacggaatgtacggggtggatcagcttggcaagaaggattgtgtgtgtattttctacagtgaaaacgcatccacacttaccttcggtcttcacgaaaaactgaatcagacaaaaggaaagatcgtattacaaaaagttgaagtcggtgtgaaaaatgcactggattttcaattgtccacatatctgggatatctgatcagtgaaaatgaaggtaaaaacgagacatattatattgtgtctgaggataaaggtcttgcgattctgacaggttactgggcagaacgtggagaaaatgtgaagactgcgtcagatattgcagcagcaaaggaagatctggaagaggaaaaaccttcaaaaacagaaaaaaaagaaaaaaaagaaaaaccagaaaaaatggaaaaagcggaaaaggaatccggtgaagagagagaaaaacctgatcagcaaaagaaattccatggaaaaaaacagcagaagggaaatgcacatcctgtgcaggcaacaagactgcaggtacacacaagaaaacaggaaacaaaatcacagaatccggcgcagcagaaaccggatgcggaaaacacagagattccggtggcagaaaaggtgctgacagaagagaaacaggaacagcaggtaaaagaagttgcagtccgtcaggagaataacggtgcagaaatcagaaaaccggaacatcgcaaatacagaaaataccacaattaccggaagtatccgcagaaaaacagaaaaacacaggaatcttctaaggtaatccgtccaatcctctcagcaggagaataaaaaaagaaaaggataagtcatatgatagcgataattgaaaaagtatatcagtttttatggggtgactggatcgtgcttccgcttccgggaggaagttcttttcggctttccctgctcgtactgatactgattccggcaggaatctggtttacgatccggacgagatttcttcccatccgtctgtttccggacatgctgcatacattgtttgaaaaaaagggaaaggcggaaggggagagccataacagtacattgtcggcattacagacactgatcgtctctaccgctacacgtgtcggtatgggaaacctagtcggtgtggttgcggcaatttccgccggaggagcgggtgcggttttctggatgtgggtgacggcactcatcggctcgtccacggcctttgtggaagcaactcttgcacagatctataaagaaaaagacccggtatatggtggctaccgtggtggaccggcctattacatgcacagatttatacaggaaaagcggggaggaaaaaagaaacgttatgtgggaatatccgttctctttgcaatctcaggactgatctgctggtgtggaatcagtcaggttatcagcaattccgtgacttctgcattccacaatgcctttcacattccgccaatctataccacagtggttctggtagcacttgcggcagtgatcatttttcgaaaaactgcaacggtaaaagtgcttgatgtgctggtaccggttatggcaggatgttattttctgattactgtgattttgatctgtatgaatttttctgcccttccgggggtgttttccagaatctttgaggaagcgtttggtattcgtcaggcagtggcaggaggacttggcacggtggtgatgaatggtgtgaaacgtggtctgttttccaatgaagccggttccggatcagcaccctgtgcggctgcggcagcagaaagcgatcagccggtaaaacttggcctgacccaggcactgggagtttttatcgatacaattgtaatctgcagttgtacggcgatgatcatgcttttgacgccggaaagtctgaccgaaggggcggttggtatggaacttttacaggtggcaatgggttaccatctgggacagtttggtgtgattttcattgcagcgacactctggctgttcagtttctccacttttctcggtattttatattatgcaagatcaaatatatcatatctgtttggagatggaatgctgccgcagaatctctataaagtacttgcattggtgatgatgtttatcggcggactggcagcatacacggtggtgtgggatcttggagacgtcggcgtgggtctgatgaccgtgtttaatattattatgctttatccgatgtccggaatcgccatgaaggcactgaaatcttatgaaacagagaagaaaaacagaaaaaaaggataaaaaacacaagatatggaaattgttcctgaataaatacaatatctgccaaaaattgtacaaaattgcatacatgcctatatttcatggatttgggattattttctatttgttttttgaaaaaagtgatgttatactacacctgacaaaaagataacaatgtaaatacacacaaacacaggaggatatgcaatggctaagtttgaacagtgggaaggcttccagggtaaaaactgggttaattccgtagatgtacgtgacttcattcagtgcaactacacaccatatgacggagatgaaactttcctggagggacctacagaggcaacagataaactgtggggaaaactgcaggagctgcagaaagaagaacgtgcaaaaggcggcgttctggatatggaaacagaagtagtttccggtatcacagcatatggcccgggatatatcgatgaaagcatgaaagatctggaagcagtcgttggtctgcagacagacaaaccgctgaagagagcattcatgccttacggtggaatcaagatggctgagaaagcctgcacaacacacggatatacaccgagtgagaaactgcatgaaatcttcacaaaatatcataaaacacataaccagggtgtattcgatatctatactgacgagatgaaagttgcccgtcacaataaaatcattaccggtctgccggatacttacggtcgtggacgtatcgtaggcgattaccgtcgtgtagctctgtacggtatcgatttcctgctggagaaaaaacactacgatatgaaacgttacgaaagacatggaatgaaaggaactgatttccgtcttcgtgaagaacttgcagatcagatgaaagctctgaacgaaatgaaagaaatggctgcatcttacggcttcgatatttccgtaccggcgaaaaacgcaaaagaagcagcacagtggctgtacttcggatatttggcagcaatcaagactcagaacggagcagcaatgagtgttggtcgtgtatccacattcctggatatctatatcgagagagacctgaaagcaggcgttctgacagagaaagaagcacaggaactgatcgaccatatggttatgaagttcagaatggtaaaattcgcaagaattacttcctatacagaactgttctccggtgacccggtatgggctactctggaagttggtggtatgggacaggacggacgttccatggtaacaaagaacgattaccgtttcctgcatactctggaaaatatgggaccgtctccggaaccgaacctgactgttctttattcttccagactgccggaatctttcaaagattacgcagcaagaatttctgtaacaacaagttctatccagtacgaaaacgacgatgttatgcgtccggtatggggcgatgactacagcatctgctgctgtgtatccgctactcagaccggtaaagagatccagttcttcggtgcacgtgcgaacctggcaaaatgcttactgtacgcaatcaacggtggtatcgatgagaagacaaaagttcaggtaggacctgcttacagaccgatcacagctgaatatctggattatgacgaagtaatggaacattacgatgttatgatggactggctggctaaactgtatgtagatactctgaacatgatccactacatgcatgacaaatattactacgaagcagcagagatggccctgatcgatacagatgtaagacgtacatttgctaccggtatcgctggtttctctcacgtagtagactctctgagtgctatcaaatatgcaaaagttaaagcaatccgtgatgaagacggtgtggtagtagatttcgagacagaaggcgaattcccaagatacggtaacgacgatgaccgtgcagatgatatcgcaatctggctgctgaaaacattcatgcacaaactgaacaaatgccacacatacagagattctgagccgacaacatctatcctgactatcacatccaacgtagtatatggtaaagctaccggtactctgccggatggtagaaaactgggcgagcctctggcaccaggagctaacccatcttacggcgcagagaagagcggcctgctggcttccctgaactctgtagcaaaactgccatacgaactggcactggatggtatctccaatacacagaccatcagcccgagcgcactgggtcatgacgatgacgaaagagtcaacaacctggtacacatcctggatggttacttcgatcagggtgcacatcacctgaacgtaaacgtattcggtacagaaaaactgatcgacgctatggaacatccggagaaaccggaatacgcaaacttcacaatccgtgtatccggatatgctgttaagttcatcgacctgactcgtgaacagcagctggatgttatcgcaagaacctgccacaaaacaatgtaatttgtctgacagattcaggtgaataaacagtaatataaaataaaattgtttggcggtgcagtgaaaaactgtatcgccaaatgttttctatggtaaaatataaaataaaaaatggaggagcttatgtcagaagaaaagaaagaactgacaggatatattcattcactggaaagtttcggttccgtagacggaccgggagtacgatatgtgatctttgtgtccggatgtgcgatgcgctgccagttttgccataacccggatacctgggatatgaaagttggaacgccttacaccgcagatgaactgctgaaaaaagcagtccgctacaaaggatactggggaaaagaaggcggaatcaccgtctccggcggcgaaccgatgctgcagatcgattttctgacagaacttttcaggaaagctaaagcccagggcatccacaccacactggataccagcggcaatccatttaacagagagggcgagcgctttgagaagatcaaaaaacttctggaagtgaccgatcttgtgatgctggatatcaaacacatcgatgacgaacagcataagatcctcaccggtcagaccaaccggaacattctggatatggcaagataccttgatgaaatcggaaaaccaatgtggatccgacatgtactggtaccggaacgaagcgacaaagacgaatatctgattcgtctggatgcatttatccagtctcttcacaatgtacagaaagtagaagtactgccgtatcacacactgggcgcgtacaaatggaaagaactcggttatgagtatccgctggaaggcatcgatccgccgactcaggagagaatcaaaaatgcaaatcagctgctgcatacaggagtgcgggtttaaagtatttacagggcacattataataggaaatgtcatgaaaaaagcaaagcatttttcatgacatttttttctttaccctttctgcattttcatgtatactgtttatgataggtgaattatgtccaatattgtaaacatcaagaataaagaggtgattgaaatacatgattaaaataaaagaatacgtgatggcagaaagcctggagcaggcgtatgaattgaatcagaagaagcgaaactgtatcattggaggcatgctgtggctgaagatgggaaaccggatggttccgacagccatcgatctgtccaatctgggactgaataccatcgaggaaaatgaggaagaattttccgttggttgtatgacaactctgcggcagctggagcagcacgagggactgaatagctacacaaacggtgcagtcagtgagagtgtaagaagtatagtcggtgtacagttccggaatctggcaaccgttggcggaagtattttcggaagatttggcttctcggatgtactgacctgttttctggcactggatacctgggtggaactgtacaaaggcggctgcatcccacttgccgaatttgccaggcagaaaccggaccgggatattctggtgcgcctgattgtgaaaaaacatgaggataaaagtgtctatctgtctcacagaaattcaaaaacagattttccggtactgacctgtggtatttcgttacgtgatggacaggtttatacggcagtcggtgcccgtccgtcgagagcagtctgtctgtgtgtgtcagaggctgactggaagaaaaagggcagtgaagcactggccggagaactggctgcgcagtttccgacagaaggtaatatgcgtgcgggaaaagaattccgaagccatctggcagaagttctgatcggcagagggctcaaacagatagaaaagatgcaggaggtataacggtatgaagatccagatgacgttaaatggtaaaaaaatcacagaagagattcagccggggatgctcctgctggattttgtgcgtgcccatgggtgtaaaagtgtgaaaagaggatgtgagacggcaaactgcgggttgtgtacagtatttgtagatgacaaaccggtactttcctgttccactctggtggcgagagtatccggccataaagtagatactctggaaggactgcaggaggaagcggcggagttcggtgcatttattgccaatcagggagcagaacagtgcggtttctgtaatccgggcatgatcatgaacgcactggcactgtttcgtgagaatccagatccatccgaggaagaaataaaagaatatctggcaggaaatctatgccgttgttccggatacgaaggacagctccggggaatccagcagtttcttgcttataaaaaagagaaagaaggtgcagtatgcaggtagtaggacaaccggtgatgaaaaaagatgcaatggcgctggtaacaggaaaaccggtctttacacaggatgtggctccggctgactgtctggtggtaaaagtacttcgaagcccgcatgccaacgcaaatattctgtcaataaaaacagatgcagcaaagaaggttccgggaatcgaagctgtgtatacctgggaagatgtaccaacccagcgttttaccatggccggacagacctatccggagccaagtccctatgaccgtcagatcctggatcagcatgtacgctatgtgggggatccggtggccatcgtagcgggagagaatgaggagtgcgtagacaaagcactgaaaatcattaaagtgcagtacgaagttctaccggccattctggattttcacaaagccaaagataatgagattctggttcacccggaagaaaactggaaagcattatgtccggtgggagcagataataagcgcaatctggtggcaacaggaaccagcggttacggggatgtggaagccgttttcaaagactgtgaagtgatggtggaagagacctatcatgtaaaagcagatcagcaggcgatgatggagactttccgtacctgttgctttatggatacttatggcagactgaatgtggtgagttccacacagatcgtctttcatgtacgaagaatcttgtccaatgccctgggaataccaaaatcaaagatccgtgtcagcaaaccgagaatcggtggtggattcggggcaaaacagtcggtggtagcggaagttttcccggcttttgtcacctggaagaccggaaaaccgtctatgatcatttacagcagacaggaatcccagaccgcatcttccccacggcatgagatggaagtaaccgtacggctgggagcaatgaaaaatggtaagatccgcgcgatcgatgtatatacgttatccaattccggtgcgtatggggaacatggtccgacaacggttggcctgtccggacacaaatccattccgttatacgaaggatctctggaggctcatcgtttttcctatgacgtagtttacagtaatgtgatgtctgcaggtgcataccgtggatacggagcaactcaggggcagtttgcggtagaatccgcagtcaatcagctggcggcaaagatcggcatagatcctctgaaggttcgtgagatgaacatggtgcgtgaaggggtgcagatgcattcttattacgatgaggtaagtaacagctgtgcactggatcgttgtctggagcgtgcagcaaagatgatcggctgggaagacaaatatccggcaagagatatgggaaacggtaaagtgcgaagcgtgggaatggccatgtccatgcagggttctggtatctccggtgtggatgtggggtctgcggatatcaaactgaacgaagacggtatctacacccttgcaatcggtgcggcagatatgggaaccggctgtgatactattctggcacagatggtagcagaatgtatgatgtgcccgattgaaaatgtgatcgtcagcggtgcggatacggatacatctccgtatgattccggatcttatgcatccagtaccacgtatattaccggacgtgcggtagaaaaggcctgcagaaaattacaggaacggatcgtgcaggaagctgcaaagatcctgaactgtgaaagtgaggaactggaattcgccggagacagtgtaaaacgtctggctaccggtgaggaagtttcgcttacccagatcggtaccagttccatgtgcggaagtatcaatgccctggaagctgtggaagacagcagttcaccggtgtccccgcctccgtttatggcaggtatggtagagattgaactggataaagagactggtcatgtagaggttcttgattatgtggcagttgtggactgtggtacggtcatcaatccgaatctggcacgggttcaggtggaaggaggtcttgtacagggaatcggtatggcactgtatgagaatattcagtacagcccgaaaggacagttgagaaataattccttaatgcagtataaaattccgacccgtctggatatgggaaaactgcgtgtggagtttgagagcagttacgaaccgacaggaccgtttggggccaaatccatcggtgagatcgttattaatacgccatcaccggcactggcacatgcaatctataatgcaacaggtctgtggttccgggaattgccaatcacaagcgaaaagattgcgatgggactcctgaaaaaatgagaattcgaatgatttatatggcggctggaaacagccgccgttttggcagtaataaactattttatccgatcgatgggaaaccgatgtaccggcatgtccttgaacggctggctgcaatatgcgaacggcacagcgactgggaaattgtgctggtcagccagtatgaagaacttctggaacagggaagaacatttgcccaccggacagtattttcaccggaaagcagggacggtgcgtcctggactataaaaaacgggctgaaggaagcagacgatgcggaagcatttgtattttttacagcagatcagccttggcttcgcgagaaaactatggaaggatttgtctgcgaaatggaaaaacagcatgcagacctgggcagtgtctgtcatggtgaaacgcccggtaatccggtctggttttccagaaaatatcttccggatctcagggcactctccggagatcagggagggagaaagatcctgaaaaagcatccggaagagattcgctggtatccggtagcacatgccaaagaactggaagatgtggattataattttgataataatttgattgtaccggacggggcatgctgatataataagggggacgcgaaaagataaaacataaaaggagatatccatgaaaaatgaattgttttccattggtccgatcacaatctacggatatggactgatgattgccatcggtgtgctggcggcatacttcagtgccacgtaccggtcgaaaaaatatgcgctggatccggacaaagtcttctatgtgacggtctgggcggtgatcggtggattcggaggagcgaagcttctgtatctgatcacgcagcttccggcgattcttaaagatctttcccttttgaaagatgcgcggaacggttttgtggtttatggaggaatcatcggaggaatccttgcagcatggctctactgtaaggtggcaaaactgaaatttatgaaatatttcgatctggtgatgccgtcggtggcactggcacagggatttggacggatcggctgttttctggcaggatgttgctatggaaaagagacgaacagtgcgtttcatattattttccacgattctgcttatgcgccgaacaacgtgccgttgattccgactcagctgatctccagcgggctggattttctgaactgcatcttcctgatgtggtttgcaggaaagaaaaaaggtgacggacaggtggcagggctgtatctggtttgttacagtgtgggaagatttgtcctggaattcttccgtggggatctggaaaggggaaatgtgggaagtctgtccacatcccagtttatcgctattttcactgcgattgccggcgtggtactgtttttctggtttggaaagaaaaaggcacagggaccggaaaagaatatacaggaagaaaaggttgtgtaactattcagcagccactatcccacgaggtgtcttggcatgaatatgccaaaatcctgagatatacaagcaaaatgccatcaccgaaggtgatttttaatgcaatttttcctgtagctgtgaaggtactgaacagttacaaggttacacaagaggaatcggataccttccgcaaatcgctgggattggatttgcggaaggtattacttctgaaaaacgttttgtaaaacaggaaaccggaagaaagggaacgacaggtcagaaaggagacagtatggaagaatcttatgaaagttttgctggtgtatacgatctgttcatggataacattgattatccggcatggtgtacgtatctgaccggtattttaaaagactatggaatagaagacggactgatcgcggagcttggctgcggtaccggaagtatgacagaacttctggcagctgaggggtacgatatgatcggcatcgacaattccccggatatgctggaggtcgcccaggaaaaacgggtggaatccggtctggatattttatatctgatgcaggatatgcgggaatttgaactgtatggaacggtcagggctgttgtaagtatctgtgactgtatgaattatattctggaggaagaagatcttctggaggtcttctgtctggccaacaattatctggatccgggcggaatctttgtctttgatatgaatactccgtacaaataccgggaggtcatcggcaacacgacgattgcagaaaaccgggaagagggaagctttatctgggaaaactgctttgatgaggaatcacaggtcaatgaatatgcattgacattatttattaaagaagaggacgatctttaccggaagcacgaagaattccattaccagaaagcatatgagccggagagagtgaaagaattactggaggaagcaggactgaaagtggaagcaatctacgatgcatttaccagagaaccggtacgggaagacagcgagagaatctattttattgcgagagagtgtacaaaataaagaaattgcagaaagtatgaaaacttcctggaagtaagcttgcgtcagatttctgaacttttgaccctggtgtcataatattatatgaaagaaaaagaaaggaaacagatatgagtgattatattgtaagagcaaccgcagccgacggacagatccgcgcctttgcggctaacacaaaagatgtagtggagaccgcaagaaaggatcataataccagccctgtggcaaccgcggctctgggacgtctgctgaccggcggtgcgatgatgggaatcatgatgaaaggggacaaagatgtcctgacattgcagatcaagtgtagcggaccgatcggaggtctgacggtgacttccgattccaaaggaagagtaaaaggttatgtaaaccatccggaagtcatgctcccggcgaatgcacagggaaaactggatgtgggcggtgcgcttggtcttggtgtcttaagtgtaattaaggatctgggtctgaaagagccgtatgtgggacagacggaattaaagaccggtgagatcggagatgatctgacctattattttgcaagcagtgagcaggtgccttccgcagtaggacttggcgtactgatggagaaggataatactgtccgccaggcaggtggatttatcgtgcagctgatgccgaacgcagaggaagaagtgattgagaaactggagaaaaatctggcacagatcacttctgttaccgaacttctggatcagggttatacaccggaaatgctgctggaaaaactgcttggtgatatggatctggaaatcaatgagaaagtgccgaccagtttctactgcaactgcgacaaagtaagggttggaaaagtattgatcagtctgggagaaaaagaactgcagggcatgatcgatgacggtgaaagcatcgaactgaattgtcatttctgtaacaccaactataccttcagcgtagaagaactgaaagaactgctggaacttgccagaaaataggcggaaaggaaatatatgagacacggatttatcaaaacagcagccggtacaccgaagattcaggtggcagactgtgtatacaatgcaggggagattctgaagctgatccggcagatggaaaccgagggtgcaaagatcatggcatttccggagctttgtatcaccggatatacctgtcaggatctgttctggcagacattgcttctggacagtgcgagagagcagctgatatggctggcaaaggagaccagtcaggtggacgcgctgatcattgtaggccttccatgggaatataatggaaaattatataatgtggcagctgtcttaaacagaggaaccattcttggtctggtaccgaagacgaatctgccaaattacgctgaatattatgaggcaaggcattttacaccggcggatcaggacttccatatggttaaaattgacggggtggaagtaccatttggaacaaaacttctgttttcatgcccgcagatgacaggaatgaaagtggctgtggagatctgcgaggatctctgggtaccgaatccgccgagtgtggctcatgcactggcaggtgcgaatgtgatcatcaatctgtcagcaggggatgaaatcaccggaaaagatacctaccggagagaactggtaaaaggacagtcggcgcgtttaatctgcggttatatctacgcaacggccggggagggagaatcttctacggatctggtatttggcggacacaatctgatctgtgaaaacggctccatcttaaaagaggcaaaacgttttatcaatcagacaatctacggtgatctggatatccgacgtcttgtaaccgagcgaaggaaaatgacaacttatccgccggcagatacggccggttatcaggaaattatatttacactggagaaagaagaaaccagactgaccagaactttcccgagaaaaccgtttgtaccgtccggaaaagaagaaagagaaaaacgatgtgacgagattctgacgattcaggcaatgggactgaagaaacgtctggaacatactcacagccagagcgctgtcatcggtatctccggcggacttgattccacactggcactgctggtgacagccagagcctttgattttcttggcatgccaagggaaaaaatcacggcagtcacaatgccgtgtttcggaactactgacagaacgtatcgtaatgcctgcgatcttaccaaaaaacttggtgcgaccctgcgggaagtagatatccgtgaagctgtaaccattcatttcagggacatcggacatgatatggaaaatcacgatgtgacatacgaaaactgtcaggcgagagaacgtacgcaggtgatcatggatatcgcgaatcaggcgggcggtatggtgatcggaacaggtgacttgtcggaactggcacttggatgggcaacctataacggagatcatatgtccatgtatgcggttaatacgtcaattccgaagacactggtacgccatctggtgcggtattatgcggatacctgtggagatgatcgcctgtccgagattctgctggatattctggatacgccggtaagcccggagctgcttccgccaaaagacggcaagatcgcacagaaaacagaagatctggtgggaccgtatgaactgcatgattttttcctttattatatgcttcgtgcaggatatgagccggataagattttccggattgcagtgcagacttttgacggtgtgtatgaccgggaagtgatcctgaaatggttaaagaatttttaccggagattctttatgcagcagtttaagcgctcctgtctgccggatggaccgaaagtcggtacagtggccgtatcgccaagaggagacctgaggatgtccagcgattcctgtgtgcgtatctggatggatcaggtggaaaaactgtcataatagtgaaaacggatggataacttctgaaaatgtattttgcagtcagtaagaagggaaaggaataagatggcagatgaaggaaacgagagaacagatgaaacgtctgatggaaaagatacagatgccggaagaaggaattgcacagcttctggaggcaagaaaagaactggaagaagcagatcactgggatgtgatcatacagacggcagagcaggtgatggcagcagacggagaactttccgttcttacccaggcactggcagatacagaatccagagaagaagcactgggagtgaaccgctatcttctggatgcactgatgttatggtgctgctgggaagaagtgaaagtgcgttatgaaaaacagggactgcctgtggaaatttactataagagtctggaagatatgaagtggaaaatgctggagtgttatgagattcatggcgtatacggcaattttgtaggtcactggtatgacggattcttcaatctgaccagattcggactgggacgtctgcagtttgaactgcgcccgtttgagggaaagaaagactgtggactggatggtgtaaggattcatcccggggatactgtcattaatatgcatattccatccgcaggtccgatgaaaccggagcttctggagaatgcgtttgcgcgggcggaagtattttttaaagagtattttccggaagattatacgatatttggtgtggagtcctggctgatcgatccggatctggtgcggatccttcctgaaggaaatatgaaagcatatgcgaagcggttccagctgatcgaggtacagaaaagtgatgaaatcttcccggacggctggagagtgttcggtgcggagtggaaaaagaaaccggaagacctgcccaggaacaccgggctgcagagagcgattgcggactatctgcagcagggcggcaggctgggaaatggttatggtatctttgtccggaaaaaataaacagacggtatcattgctgaagaacggaagcttttgcaagggcacttttgatggcttctaaaagcagcatggaagtatatttgttatcgtcttcgtaggtgatatcttccagagactgtttttcataaatctgggaggcgagttcttcgagtgccggtttcatcagtggatacatggcagcggtggattcacttaagtttaccagttctatggaattgatgtggttgctgtctacggttacctgcacatcgaaggtattgtcattcagttcaatggctgtgctatagacgcccggaagatattgcccggtgagggcagaagttgtctgaacagaggcagcggtttctttgtcttttgatggtccgaacatgatcaaaagcagaatgatcatcaggagaccgagtaggagaaagatagcggtatagatcacttctttcatatgtagtacaacaatcctggttttggaactcatagtacacactccttttccgatgcttttctatagtgtatgagaaatggtgtgattttatgaaatatgggtttccggaaaattgaatgggaaactttcagtagtacaagaagaaacagggggaagaaacgatgggaatggatgcctgtatgctgtgtccgagaatgtgcggcgtagaccgggagtccggagagaaaggttattgcggaatggacggaaaactgcgggcggcgagagctgcacttcatatgtgggaagaaccctgtatctcaggaacacggggatctggtgctgtatttttttccggctgcagtctgcggtgtattttctgccagaattatgaaatcgcacaaggaaactgtgccagggagatttccggggatcgtctcagtgagatttttctggaacttcaggaacagggagcagcgaatatcaatctggtaacggcgacacattttgcaccggctgtgatcggagcactgaaaaaggcaaaagcacagggaatgtatctgccggtgatctacaattccagtggttatgaacgggtggaaacggtgcagatgcttgaagaagtcgtggacgtgtggctgcccgattttaaatatatggatccggagctttcctttgcctgttcgaaagcgaaagattatccggaagttgcggtggcagcgatccgggagatgatgttggccggaggaaggtgtgaatacgatgacaacggttatattcagaaaggtgtgatcgtccgccatctgatcctgccgggccatacgaaaaactccatagcagtgcttgatgagttatatgaaacatatggaaagaacctgaccatcagtctgatgaatcagtatacccccctccctcaggtgcgtgatatcccggatctgaaccggagggtgacaaaacgggagtatgaaaaggtacttgatcatgcactggatcttggtattacacaggggttttttcaggaaggcgggacagcaaaagaaagtttcattccactttttgactatgaagggttataatgcaatcaaacagaacgggaagctgcatattccgtgtgaaccaatcagaaaaatgtaaaacacagttacgacccctgccggtaaaaagacaggggtcgaactgtcagagagaagaagacagacgaaaagatgctgagcgcagacagaagcaggaacaaaaaaaggaggaaaagatccatggcactgcaatttgtaccaggtaattcgggagctggaaaatcttttcagttatatcagaaaatcttacaggaagccggaacacatccggagagaaagtatctggtgatcgtaccggaacagtttacgatgcagacacagaaggaactggtagctttgagtccccgtcatggaatcatgaacgtggatattttaagttttgaccgtctggcacaccgggtattcgcggaagtaggcggtgatcagacacctgttctggaagacgtggggaaaattcttgtactggaacgcgtggtgcaggaacagaagaaaaagctgggagttctgggtagcagtctggaaaaactaggaaccgtcagtgagatgaaatcactgttatctgagctgatgcagtacgatattcatccggaggaactggacgagatcggcaatatggcgaaagaaaaaccgttgctgtatcacaaattaaaggatgtgcagaccatttatcagggttttttcgagttcttgagaaaacggtatatcacggcggaggaagttctggatctgttgtgtgagaaaatcggaagttcccgactgatgagagacagctggatcgctttggacggatttaccggatttactccggtacagaataaattactgcgggaactgctgaaactggcacagcaggtatgggtgacggtgacgctggaggaaaaggtgtccgtggcacagttaaaacgtccgcagcatctgtttcggatgagtggggagatgatggaatctctgaccagaatggcagcggaagaacgggtggaagtcttggatccctggtgggtgcatccgggagaacacagccgtttttgcgaggcaccggcactggaatttctggaacagcatctgtttcggtatgataaacggcagtaccggaaggaacaggaagaggtacagatttttcaggctgcaaatccaaaagaagagatggaagagatcgccagaaggatccgcctgctggtgcggacaaagggctacaggtatggggactttgccgtgatcacaggggatatggcgacgtatggaagttatgccagacaggtcatggaacagtgtgagattccctgctttatcgatgaaaaacattctattctgatgaatccgtttgtggagtatatccgggcggctgtaaatctggtggtagagtatttttcctatgagagtatgtttcgctatcttcgctgtgggctgtccggaatcccggtttatcaggtggatcaactggaaaattactgtatcgctgtgggaatccgcggggaaaaacagtggaaggatcactgggtaagacggtaccgggggatggaagaaggcagtattgaaggaatcaaccagatccgggaacaggtctgggaaaagatcggtccttttgcggagtatatgaaagaaaaagagcacacagtggaagaacggacacggatgctctatgagatgatcgtaaaagatgatattcaggaacggttatctgagaaagaacaggaattcgctacacagggcgatcaggcgatggtgaaagaatacagccagatttacggaatgatcatggaacttcttgataagatggtgcagatgcttggcagcgagacgatcacggcgaaggagtacggacagcttctcgatgtgggatttcaggagatgcgggtgggcatcattccaccgacggcagatcaggtactgatcggtgagatggagcgtaccagactgaaagacatcaaagtactgttctttgctggcgtcaacgacggaatcatcccgaaacacggagggaaggcaggtctgctgtctgagtcagatcgggaatttctcgacagccgtcaggtagcactggcacctacagcaagagaatccatgtatatccagcgtctctatctgtatctgaatctgacgaaaccttcccggtgtctgtatctttcttacgctcagtcaaatgcacaggggcaggcacagagcccggcgtatctgatcgcgctgattcttcggatgtatccgaaactggtgatccaggataatccgaaagacgagatcagccagatgcagatggcacagcaggcaacggagattcttctggaaggacttcgaaaggatggagaacagcagcagaacgatggctggaaggaactgttttcctggtatctgcggtcaaaagagtggaaggagcagtgtcttcgctggatccaggtggcatacgagggcgcaccggagagcagcatcggaaaagcggcggcggtggcactttatgggaaagaactggaaaacagtgcgacggaactagaacggtttgcagcctgtgcctttgcacattttctgcagtatggtctgaagatcgaggaacgacaggaatacgaatttcgtcaggcggatctgggcaatgtaatccatcaggcactggaacagttttcacgaaatctcaaaaaaaaccagctgacatggcgtagtctgacggatcaggaacgggatcagctgattgatacgagtgtggaggaaaccattcacgactatggcaatacgattctggagagcagtgcaagaaaccagtatatgatcctgcgtgtaaaacggatcctgcggcggacggtctgggcactgcagcaacagctgaaagcaggaaaatatgaaccaagtcggtttgaaatctctttttctatggaggaagatctgaaagcatcgaattttcagttatcggaggatgagcgtctgcgcctgcgggggcggattgaccgggtggaccgctatgaggaggacgatacgatctatgtgaaagtcattgattataagtccggcaatacggctctggatcttacttcggtgtatcacggactgcaattgcagcttatcgtatatctgaatgcagcactggagctggaagaaaagaatcatccgggaaaacatgcagaaccggcggggatgttttattatcatgtcaaagatccactggtggatggaaaacctggggatgaggaagaggagattgaacggaaactgctggaaaaattaaaggtagacgggctggttcgggcagaagaaaagatcttaaaggatctggatagggaactggaagcagggaaaaaatcgctggtgatcccagcagcttacaataaaaacggcagcctttcaagtcgttccaaaacggcaagcaaagaacagttcgaagaactctgtgcctatgtcaacgataagatccgtgaaaatggaacacggatccttggcggggatatggagaaaaatccatataaattaaaacaacggaccgcctgcgactattgcagctttaaggaaatctgcggatttgatgaaaagcaggagggaaacagtttccggagacttccgacattttccgatgaggaactgtggaagaaaatgagagagaaaggggagaaggaagatggaaatgaagtggacaccggaacagcagaaggtcattgaactgcgggacagaaatatcctggtcagtgcggcggcaggatccggtaagactgctgttctggtagaacgaatcctgggaaaactgaccagaaaagatcatcccatcgatatcgatcagctgctgatcgtgacatttacccgggcagcagccggagagatgagggagagactgacggaagctgtggagaattatctggaacaggatccggaaaatgaacatctgcaaagacagcagacgttgatccacaacgcacagatcacgacgatcgacggattctgctcttatgtgatccggaactattttcacaccatcgatctggatcccggatttcgcacagcgaatgagggagagatcaaactgctgaaacaggatgtggcaaaagaggtgcttgagagcagttaccaggagagaaccgaaagttttgaccgttttgtggagagttttgccactggaaaaagcgatgaggtgctgacggaactgattctccggatgtatgagtttgccatgagtaatccctggccgctggaatggctggacagctgtacgaaggcatacgagatccggacaaaggaagagctggtgtcctgtatatggatgaaaaaactgtgggaggatgccggacacctgctggatcagatcacttatcttcaggaacggtgcaaagaagtgatctacagtcccggcggaccatatatgtacggagaagcgttggaacaggatcttttgtttcgaagagatctggaagaggctttcgcaacacaggattttgacggatgcagagtcctgctggatagctggaagccaaaagcactgtcacgaaagaaagatgacagtgtgcaggaggataagcgggagctggcgaagaacctgcgggatcaggcaaaagatgctgtgaaaaaactgcgggagaattatttttatgagacaacggaggaagtgctggaagaactggaactttgcagggagccggtgcaggaactgattcgtctgacccggcagtttatcgagacattttcggaaaaaaagcgacagaaaaatatcgttgattttacagatatggaacactttgcgctggagatcctggtcaaaaaagaaggcggggagatccggtatacccaggcagcggatgagttttccgatcgttttgaggaaatcctgatcgatgagtaccaggacagcaatctggtgcaggagactttgttgcagagtgtgtcacagcttcgcttcgggcggcataatctgttcatggtgggcgatgtgaagcagagtatctaccggttccgccttgccagaccggaactttttatggaaaaatacgaaacctacagtctggaagacagtgtatgtcagaggatcgacctacacaaaaacttccgaagcagagccggggtactcgaaggggtcaatcagatcttttaccggatcatgggaaaggatctgggagcggtggaatacgatgcagatgcggcattgtatccgggtgcggtatttgaagaaaagccggagggagtaccggaagaaccggcgtgccaggtgcttgtggcacagaccggcacggacggtatggatgagaagatgcaggaacagagcgatcaggagctggaagcacggatgatcggagaaaagatctgcagcatggtgggaacagaactggtctgggataagaaagaaaaacagtatcgtcccgcacgttatcaggactgtgtgatcctgcttcggacgatcaccggctgggcggagaactttgtcaatgtactgatggacatgggaatccctgcctatgctacctcaaaaacaggatatttttccacgacagaagtacagacgatcctgaactatctgcggatcctggataatccgatgcaggagattccatttaccggtgtcctgttatcgccgttaggcgggtgcagtgcgagagagctggcactgttaaaagcctgctatccgcaggagaaaatttatggctgtgtctggaactatctgcaggagggacaggacggggagttgtgtgaaaaacttggcaatttctggtctgtctatgaaaaactccgtgaaaaggttacttatacgccgatccatgaactgatcggagagattctgacaaagaccgggtatgggttatacgcaggtgcgatgcccggcggtgcacaacggcgggcaaatctgcagatgctggtggaaaaagccatggaatatgagagcaccagttaccgtgggttgtttaattttatccggtatgtggaacaattgcagaaatatcaggtggattttggtgaggtcaatatccgtggagaacaggaagatacggtgcggatcatgagcatccacaaaagtaagggactggagtttccgattgtctttgcggcagggatggggaaacggtttaatatgtccgatgccagcaccggtctggtgattcatcaggatctcggtatcggcatgcaggcggtagaccccaaggaacggacgcaggcatcgtcactggtgcggcaggtgatccagaaacagatccggctggagagtctgggtgaggaactgcgtgtattatatgtggcactcacaagagcaaaagaaaaactgatccttaccggaaccgttaaaaaaatagaggattatcaggcagtacaggcggaggcgcgggactggcaggaagagaaacttccttacggtatgcgggaaggcgcgcgctgctactgggactggatttttccggcacttgccggagcaaacgaagagtttccggtgcagatccttgagatggaacatctgatcacggatcaggtaacagaccgggaagaccgggtacggcagagagccgcatacgaaacctgggatccgcaggaggtgtttgatgcgacgatccgaaaagatctggaagagaaattttcctatgtgtatccgtatggatatctgcaggagattccggtgaaggtcagcgtatcagaactgaaaaaacagggcagagaggagcaggaggaagagaccgtctatctgtatgaggagaaagaacaggaaccaatcattcctgattttatgaaggagagcagggagccgctgttgcagggcgcagcaaggggaaccgcatatcatcggatcctggagtgcctggactattcaaaagcagattcgcagcaggcgatcgagcagcagatcgaagaactgttgcaggaagaaaagatcagcaaagaggcggctaaagtggtacgttccagtcagatcagctggtttgtgcgttcagctgtgggaaaacggatgaaagaagcttctgcccttggcacgctgcaccgggaacagcagtttgtgatgagtatcgatgccagtgagagaaatcctgcgtgggatcagggggagcagatcctggtacagggaatcatcgacgccttctgggaagaggcggacggcctggtgttggtggattataaaaccgaccatgtaaaagagggacaggaactgatcgaccggtatcagagacagatgcattactactgtcaggcgttggagcgcgcgtatggaaaaaaggtaaaagagtgttatttatattcatttgcgcttggaaaagcggttgctgtggaggtgtaacctccgcggcagccgctttttgtagatatttagaagaagtcttaagatattttaaagattcccaggatttgttgacatctaatattatacggtatatagtattaaatgcaaaacaacatacggtccgggaaaccgggggaaaggtatgagcggagtcttttcgtgaaaacagatcgggaaagggttcgaacatacagaaaaaagaaaaaggggtgcgatatggtatttaatacaggagcggctcttttggatgccattgttcttgccgttgtctcgagagagaaggaaggcacttacggatataagatcacacaggatgtgcggaaggttatcgacatttccgattccaccctgtatccggtgcttcgcaggctgcagaaagatcagtgcctgatggtctatgatctggaatgtgcggggcgcaaccggagatattataaagtaaccgagcagggactggcccaattggggttatacaaagaggagtggaagagatattcatccaatatttccatggtttttgagggaggaatcaacaatgaatcgtgagcagtttattgcacaattagcgagacttctgcaggatctgccgccggcagaacggcaggaagccattcgctattatcaggaatattttgacgatgccggggaggaaaacgaggatgccgtgatccaggaactgggaagtccgggaaaagtagtagcaagcatcaaggcaaacctgcagtatggcggatcgacattcggagcgaatgataccgatatggaaaatacagggacagaaagtcagacgaaggacgccgatggctggcagaatgcagatacgcagggacagagcggtcagcagcagacctggcagaatagaagtacgcaaagcccgtatgcgatgcaggcgagaaaaccgaaacgcggtgttggcggatgggcactgctcatcattatactggtctttgcatctccgatgcttctcggcgttggcggtggagcacttggcatttttatcggaatcctggcaaccgtatttgccctgtggatcagctttttcgccgtagcgattggaatgatcggaggcgggatcgccgttctgatcaaagggatccttcatgcgatcagttcaccggcagccggactggtaagcatgggcggcggtctgatctgcatcgcactgggaatcttatgcgcagtatttttcctgtggtttacctttcagctgtgtccgcgtgtattacgtaccacgttgaattttatctcaagaatcgtacataaaggaaaggaggcaagggcagaatgaagcgtttgaacaaagggttacttgtaaccagcggaatctgcgggggactcgggcttgcccttctgatctgcgggatgcttctcggaggaatccggggaggaaatgatctggtggatgcactttccatcaacagcggggattttcaggagatgaaagatgaggttatgagtgaaatcagtgaccataccaattttgatccgattaactggtttgtggaatgggtaacggatatattttaagcgtgggtccgaaaaaataacagagagtaaaaatttacatgataaaaggagaatcagaatatggaaaataagagattatatcgttcctcaaccaattatatgatctgtggagtctgcggcggaatcggagaatattttaacatcgatccgacgctggtgagactggcatgggtgatcttttcctttatgggaggatccggaatccttgcgtacatcatcgcatcgatcatcattccgaaataaagaacaacgtgaatagaaagagaaaaaaaggtcatacttcaagagaaaaggagtgtgactttttttatgggaaaagagaaaaagataagccgggaggatatcgcaaagatgagccgggaagagcagatgaaatatgagatcgcgcaggaactaggacttctcgatcaggtgcttgaagaagggtggaagactctgtctgcaaaagagacaggaagaatcggtgggatcatgaaccggagacgaaagcagaaagaaaaagaaggcggggtcagtcatggaaaagagcagtaaacgcctgatgccagagatcagcaaggagtgtgttgccatgtggcgtcagatgaatcccgtcggtcgtgatcgcatcgactccttcctggcgagctgcctgtcggaggattgagtccgtcgtgataaaatgagcagaataagagagtgccagatcgtggatgatctggctttctttttcgatatacggatgccaggcggagtattctgccggttcatcaaaaagaaacggttccagtaacaggatggtggaagtatgctggcataaaagatccagcacttcccggtaaaaagcagaaaactccagaggaatcctggagtgagaagtaaaaagttccacggggatatcattgactccggcaaggagggtgatcgcatcccaatgaccgccgatcccgtcccgacggagcatctgtaacacccgttcaatggtaaatccttcatgtccccgatttacaaatctggcgtctacatatttcggtctgcgggcaaggagagagacatagccgtatccaagattggcaggatcaaaaagatgatccgcatcggtgatgctgtcgcccagaaaaagatactgcttcatataatccctcctttggtcataatactagagcgtgtctgaaaaatcatttccgcaatctgcaagccccactttgcggtatattttaccctcattcagttgccgtagcccgctacgccgccctcattcggataaaatctcccacaaactgagactcgcagctcacgaaaagcctttttcagacatgctctagttcgtgctgtttgtcagcagggtattcagatttaattttaagatccggtcaaactgtgtcagcgaagtatagcgatagccatatgcagcggattcaaacagtacatagagatcgtcaccatccacatagatctgttcgagttttgacggaaaacggatcttctgcagcatggtgtcttcttcaagaagcatctgcagagagttcggaaatactttcagagatcccgggagcaccccgtaagaatgagaggtgaggatcctgtttttataaaatgccacaccctgtgcccgttctgtgatcacgcgcatcccggatggcagggcaagtggtgtcagcgaatccacacccagctgaccggttgttatcgtgtcatcatcgacggtactggtctgtaaggttccatcttcggtgatatcatattcttccagtacgcttgcagaattggaagtataataaccgatatataatgcattattatgataggtcagaaaagaattccgtgtaattgcatacagatcgtaagactgcgagtaggaaatcggctgatggctattctgaaaacaatagtttttcagctgttccaatgtgattgcattgacctgtggaataccacgggacatacaggagatccagatgttgttatgaatcgtatcgtatgcgatcccgccgacatgggatttatttcgaagaacaatttcttttacaaattcatgggtctttttatcgatgacatagatgacagagttatgcgtattggtatgacagtaagcagtgaccagaaggtaatcttcggtaacggcaagtccctggggagtcatggaagtacagatggaagaagtatttttttctccgaaaacctgtgtttctgtagtattaagtccaggaataatataggtaccataatcaatttcggtagcacgtccgtataaagctgcccgtttgacttccggtgtcagggaaagcagatcccgtcggctcttaaaactgtagatttcttcctgcacggtgccggtagctattgcctcacgttccacccgtctggtatatgcagaaaaaaggagaatatatgaggtgactccgattccgaccacaaggaaaaagacgaatatccagaaaatccggcgatgcttttttgtggatttattttcttttttgtgcctgtttttcataagttgtctcccaagatgtgatgatactgtcaatctaactgttcagtaggttatattccgcgagatgattttaaatgcatgttggcttataactgtgaaggtactgaaaagttacctgttaatcatatcttattttaagaaaaaatacaattaaatatataatattcctgagtggtttaaaaatctccggataaaatgaggaagggccgataccctttcggataccggccaatatgaaaaaggaaatctaaaaataactgttaccacttaatgagggggagggtgtcacaacaggcgatgttgtgacatcctttaacaaagtgtggttcgctttgttgagtattatattacatggaaaatgtgataaaaatgtgtctatgtaatgaagactttataaaatttcaaaaaaaaacagaaagaaattctttagattttcaaaccgcgatatcggttgatgcatgcatagacttcctggattcgtggcatggcgaggttcggagcaagccgaccgccctcggagagaatctcgagtcctctgtcggataattctgtatcaagtcgatctatgatctgctgcagtgtgtctttcccattaaaaagccgacgttccgcatagcagagaatagctgaaagtgcctggatctgttccgggtcagccagctgttcaagacagcgcagatcgatggtatcgtgattgacggagatactgtccataccgagtaccttcatcttcagacggcgatccggacggaaagcgggatcaggctgaatcacacggcgatagtctgcaacagcacctgcaggagcggagggctgaatagaagggaaagcttccgcttcttttttggcaaatgctgtgatatccactggtttgtaatgatccatctgtaaaatcgtatctgctacatgaaaataagatcccgaactaccggcaaccagaatcgaggagattccctgtgtatcactcaaccattgcacacgctcaatgaatggtgtgatcggttcctgattgcggttgactacccgctgcatcagttcatcgcgaatcataaagtttgtagcactggtatcctcatcgatcagaagcaggtgacttcccgtttccagtgcttcgatgacattagcggcctgagaagtacttccactggcatcttccgaataaaaggaatgggtatccttgtggttcggcagatcattgataaagaaagaaatgtctgtgtgtttgatgcttcgaccgtcctcggcacggatttttactgcgtcatctctggtgatcacatattctcttccgtctcccgcaatatggttatagacacccagttcgagcgcttcaagcagagtggatttgccgtgataaccgccacccacgatcagcgtgataccacacgggatccccataccggtcagcggaccgtggtttggaagatgcagtgtgactgccatggaatccggtgagacaaaggaaattccgtctttcatcggaagaggagacacgccggattcccgcggaagaacagcaccgtttgcgacaaaagcggtaagatttcgtgcagccagttcttttcggataaaggtctgatcttcggcaagtgcccgcacctgttccagcttccgtgcatccagatttcggtaaaaaagagaagctttcacacagaccggaagaaaatcaaagagaatcttgatcagttctccggaattgaccgtacgtccgtttgcaggaaaaccgacctccaggcgaagagtcagatcaccgttttttgcatccatcgtgcaggcggaacgctccaggatttcctgtccgggtcttgagatggagatcagaccgctttttccggaacctttggcgcgaaagctgtatttttcaatgtgcgcagcaaatccacggatcagctgatcctgaagcgcgatccgcatctcgcgtgtcgcatacagagcctccggaaaacctgcctgagcacctttgatatgaaggctgagcttcgacggtgcggcaaagggatcgccctgtacatggtcgatagagagtacatagcccggaaaacggtaactgccctttgtgtctttatacgccggataacttttacggttgatccggaaaagaagatctttcagatcctgagaagtatttatcatggtattcatcctttctggaaacttcctttgataccggattgttccgtacgtcgtactcttttaaccccggtatcattccataaaacagtataacaatattgtaaaatacagacaagcgggaagaaggacttttgtttacgggattttgcagttataataaagaacagaaaacgttcaaaaatgagcagaaggagaaatgggatggagatcgaaagaaaatatctgatcaaaaaattgccggaagatctggcacaatatccgtatatggagatggaacaggcgtatctttgcacggaaccggtggtgcgggtgagaaaagaaggagaggattatgtgctgacctacaagtccaaaggactgatgatacgggaagaatataatctgccactgacaaaagagtcttatgaacatctgctggaaaaagcggacggaacggtgatcacaaaaacccgttatcgcatcccggagaagaacggactgacgattgaactggatgtttttcacggaagatatgaaggactgcttcttgcggaagtggagtttgcaaccgaggaggaggcaaacagctactgtccaccggagtggttcggagaggacgttacgatgtccagtgcgtaccataacagcacgctgagtcagaaaaaataaagaacagaacgaaaaagagactattttgtgatgctttcaaggggatacctcagttttcacaaaacagtctcttttttacaagagcaacgggtcaaagtctgtgcttttacaaaaacgtatcgactgtcgcgattcgtcaggtatcacgaaaatcaaacagatctttcaccggaacttccagaacatctgcaatatcaaaaagtttattcagagaaattgatgtttttccatttggtgcctcaatattgctgatatgtgtacggctgaggtttgttgcctctgccagttctgcctgtgtaagtccacgaagtttgcgataataagcaatggtcagaccaagaagccgaaactcattgatgcgtttatagtccatatccctgttcctttctccatacaaacagacgtagcgcctgtgtttttcttagcgtacagcagaatatatcgaaaagaaacaatgtgagaatttgcaaatataaagtaaaatattgcaaaatagaggagaaattttaaaaatgcaagaaaaggacaggcagggacacagtttcagactatttttcttctgtatcaggagaagagttcattctgggaggacggtaatgatagacatcctcataagattcgagttctgcttcactgaccggcgcggacggaatcagtccggtgcagtcatgcgtggatgccgcattggacagataatcataggaatcgatcagtttctggttttctttctctttcatgggcagtgacctccgtaaaggtaattataggattaaaatatgcgaaaaaatattttttatacagaagggaaagatctggtgggataaaagcctttttcagacacgctctagaatataaaaagagaagaacatttcagagaatcgctccctaaatattcttctcttttctacattattttacagacgctgcagatgtctgctttattttaattccatgtttctgacggaaagcatcaatcgtagcaagtccaggtctggataccgggcggatccatttgccggaataaagatgatgctgcatcagagtataccggatcggttcgtcaatatagcagaaggcaaaaacgagaaggaacggcgcatgaaaataaaagttcgagagatatacgaaaggcagaaccatcagatacataaacgtaatctcaagaatcgatccaaatgccgcatcgccggcggaacggtaggtatcgttctgcgtccagtttcccatacggatgatcgctgccatactatagatgatcagcataccggtaccgatccgataggattcaccggaaagccccagtgtatgtaacagtgggttgtggatcagtaacagggtaagacaggcaactgcgatgatgccgctgcacagatagaccagacgctttgctctctgataagcgacttcgtgattacctgcgccaacctcttttccgacgagaacggaggcagcattggaaaatccgctgaaaaaggcgatgatcagtccttccagggtacgaaagacggcgacagcagcgatagcctgctcgctttgacgaccgagaactatattgatcagcatatttccgacaccgataaatacttcattacagatgatcgggaaacatttttccaggtactgttttacatagaccttactccagcgaaaatgtctggaaaactccaggacatacgggattctcttatacagaatgcagatgaccagaatcaggacatttacgatacccgccataacagttccgacggcagctcctgctgcacccatttttggaagaccaaactttccgaaaatgaacaggtagttgaagaaacagttagcgacaacggaagcgataccaccgtagagcggaatcttcacctgttcgatggaacggagcagagcactggcagccattgcgatgacctgaagcggataggcaaatccgacgatacgcagatacgaaatcccgattttctggatctccggtttgtccgtgtacacccccatgacaaattccggtgcgaagatggcaagacaggcgaaaagaacacctaccgtcatcatgaaaagcagtgtcattccataggaacgggtgatgccgtcatgatccctggctccccagtactgagagaaaaacagcataccgccaccgacaaatccccagtacccggcaaacatcaggctggaaaactgtgcacacagaccaacggctcccacagctttttcaccgatcgaagcaagcatgatcgtatccaccatactgcctgttgtggtaagcaggttctgaagtgctaccggtactgcgatgatcgcaatgtgcttcagaaagtagccccagtcaaagtttttgtgattcatttgtaaaaacctccaataacatataatatagcgttatgttccaagtgtaacagtttttgaaacggaagtcatcaaaagaagccagaaaaacagcacaaaaaaatcctgctgttttcatgattttgtacagaaaaacagctgtcaggaaatgtcctgtcctgttagagcgtgtctgaaaaatcatttccgcaatctgcaagccccactttgcggtatattttaccctcattcggttgccgtagcccgctacgccgccctcattcggataaactctcccacaaactggaactcgcagctcacgaaaagcctttttcagacacgctctagcccggatgaacctgaagagttactgtttactggtaatattccgcgaggcgtgttgctggcacggaatgaaccgtaatcctgaatatgatgaatcctgcaactgcaaaatgtaaattgtcaacaataccattatctggtatactgagcatattaaatgaaaatttggaggaaagattaatgagtataaaagaagaaatccatgctttgacagacgagatgctgacgaatctgggaagactggttgccattgattctcagcttgggacaccggcagagggaatgccttttggagaaggacctgcaaaagcactgaaagtaggactgaaaatcgcggaagaactgggatttaagaccgtgaatctggataactactgcggatatgcagagatgggcgagggggacgagatcgttggtatcgccggtcatctggatatcgtgccggcaggcggtgactggacacatgatccattcacactgacacgtgacggtgactatgtgtacggccgcggaaccaccgatgataaaggaccgattcttgaagctctgtatgcgatgaaactgctgcgtgattccggtgtgaaattaaacaaacgtgtccgcctgatcatgggatgcaacgaggaaaacggttccaaatgtatggaacactataatgaggttgcagaagaattgtcctgcggttttacaccggatgcaagctatccatgtattcacggagaaaaaggcggcgtgcatatgatggcctattccaaaaacacaaagatcatctccatgaacggaggatttgtggtcaatgcggtctgcgactcctgtaataccgtgatccctgcagaagcgggactgaaagaaagactggaaacagcactttccgagacaaaactgcaggaatataaagtgaccgaagaaaagggaactctgaacatctatgccaaaggtgttccggcacatgcaagtacaccgacactgggtgtcaatgcagcaggggttaccttcgaatgcctggaaaaagcaggatttgaagatgattttgttaccttctataatacccatctaggaacttcctgcgatggtgcaggaatcggactgaagtttgccgatgcttacggagatcttactttctgtaatggtatcgtaaagactgaggacggtgtaatctcctgtacgatcgatatccgtgttccggttactttgaaagaagaggagcttcgcagcatgtgtgaaggaaaactggaagacgaaaatggccgtattgagatccggagcgtaggggaatccctgttcttcccggcagattcaccgctggtgactgctttatacaaagcctatgtcgatgtaaccggagataccgagaacaaaccgatggtaatcggcggtggaacatacgcaaaatccctgaaaaatatcatcgccttcggtccggagatgccaggcatcgattatcggatccacagcgcggatgagtatattctggtgtcaggcatggaagagtctgtgctgatttatatggaagcaatcaaaaatctgctggctatctgatgagagtcggagaaaaactactgtcaacatccggggtagaagttgacggtagtttttcttttatggtatttgatttccgtgtgcaacgagtcaaagtctgtgtttatatgagagttgatcagtgccggataaccggagataaataaagagagcatgagcagaaggagaaaaatatggatgagagattaaaacaacagctggaatttgttctggaaattgataaagaaaagaatattttccgccagacccatctgtccggtcagggcagaaacgaaaacgatgcggaacacgcatggcatatggcgatcatggcgtatctgctgcgggaatactccaacgagccggtggatatcggacgggtgatgttgatgtgcctgatacacgatatcgtggagatcgatgcaggagatacctatgcatatgacgcagacggtctgaaaacgcagaaagccagagaagatgcagcaaaagagcggattttttccttgctcccggaagatcagaagcaggaactggttcggattttcgatgagttcgaagcatttcagacgccggaggcgaaatttgcccgtgccatggataacctgcagccactgctattaaacgacagtaacgacggcggcgactggaaagaacatgaggtaaatgctgaaaaagtgtacggaagacagcgaaaaacaaaacgcggttcagaaaaactttttgaagtgacagatcagattctgaaagaaaatattgcaaaagggaatttgccggaatagtggtaaatacagaacacggaattttttgtctgataaaattggagtagacataaagaatataatttatcaaaattggcaccttccagcctagttttccataatgtaatattatgaaacagacccaggaggttaggatgaaacaagtaaaattcataacagggctgatggctttcggggtggtcagtctgtttgccggatgtggggaaaaagagaatgaaatgacaaaggttaccctgaatgaggtggcacattcgatcttttatgccccacagtatgtcgcactggaaaatggatattttacacaggaaggcctcgacctcgacctggtgaccgggtacggggcggataagacgatggcagcggtcatttccggggaggcgcagatcggatttatgggagcggaagcatccgtgtacgcgtatcttgaaggcgccaacgacccggtgataaacttcgcacagggaacccagcgtgcgggaaactttttggtagcaagggaagagatggcggattttcagtggagtgacctgaaaggaaaagaagtgctgggaggacgaaaaggcggtatgccggagatggtttttgagtatatcctgaaagagaacggtctggatccggcaaaggatctttcaattgaccagagcattgattttggttctactgctgcagctttctccggtggaaaaggggagtttacagtggaatttgaaccggcggccacgacacttgaaaagaacggggatggttttgtgattgcttcccttggtgtcgattccggctatgttccctatacttcctacagcgcaaagaccagctacgtcgaaaaacatccggagatcatccaggcgtttaccgacggtctgcaaaaaggagtggactatgtgaattcccacacggcggaggagatcgcgaaggtgattcagccacagtttaaggaaaatgatccggatacgataacaaggatcgtggaacgttatcagagtcaggatacctggaaagaaaatctggtgttcgagaaagaatcctttgaactgttacaggatattctggagagtgccggagaactggaaaagcgggcagattatgagaaactggtgactacgatatatgcgaaagaagcaatgaaaaaatagtggaattgaaaacagatgtaccggataaacaggtgacataatatcaaaaaactgtaaaaaagatcatatcctcataataaaacgatgagtggatatgatcttttttcgtcagtttttcatctcatactgcatcatctcataatgaaggatacatccctcataaatctctgcaggaagcagtgcacgggccaccagttttggttcattctccgcagcgtcctgacgttccaggtgggcatagtcaccatcgatggaaagtactttataatcacaggtcagcatcagaccatcacctcatttctcatgatatttttttcagtataacaaatttttctcgaaaatgcatccatccggtgttataattggcgataacagagtataaaaagttactgttcagcatagattcagtgcatcgcgcagcgtgttactgagcacggagtgaacagtaactataaaaaaggggcgtagagagttgaaaaaaagaagatacaaatatcttgccggagtactgctgtgccttgcagcgataaatatacaggtacctgacactgttctggcaggcacctggcagcaggaagaaaacagctggtggtatcaggaggatgatggaatctggccggcgtggcagtggaaagagattgataataaatggtattattttgatgagaatggttactgcgttaccggatggcgaaagattgatgataactggtatgattttgacgaagacggtgtgttgcagaccggacgatggatcgatgagtattatgtgggaaccgatggcaggatgctgacggacacctgggtcggcagatattgggtagacagtgaggggaaaaaggacacttcgataaaaaaagaaaaagacctgccattagagagtctgacactgaataaggaatcaattaccctgctccagggtgagacggcaaatcttctgacacagtggcagccgcaggataccacccggtggaaatacatgcagtggacgagttccgatcccagtgtggcggaagtttccagaggaaaaataacggccgtgggggaaggcactgcaaccatcacagcaagtatgggagcgaagaaagcaacctgcacggtgacggtgacggacagcgaggtatgtaagacagctttgaaactgctggatgcccagtacatctggggaggcaatggaccccaggacggaggtgtggactgctccgggcttctgatgtatgcgtatacacagaacggatatgatttcggtgccgatctgaacgctgacaattttgcccggtacgggcaggaggtcagccgggaagaactgcagccgggagatgcgatctgtacctgttataacggggaacgatatcagcatattttattgtatattggaaatgatatggtggttgcctccgagtgcggaggaccgacggtatgttctctgggattgagctgtgatcagcatgtgaagggaacaaaatgcaactgccgaacctggaaacgcccgttaaatgaaaacgatcttgtgaatgcaaaattcgtccgaatggatcgttataaaacctgagagaacgaacattcagaatacttggaaaaaacggatgagaagtttttaaaattttcaaaaatatatttgatataagcaaaataataatatatatattacagcagaaggagaaaaagatgaaaattggatttatcggatgtggaaatatggcttccgcgatgatcggcggaatcataaaaaatcaggtggtagcaccggcggatatccttgcttccgcaaaaacagaggtcagccgtgaaaagaaaaaagaagaactggggattgcaatgactgcagataaccgggaagtggcagcatttgcagaagttctgattctggcagtaaaaccattttattatgaagatgtgatcaaagagatccgggatgttgtagccgatgataccattgttgtttctattgcaccgggaaagaaactgacatggatagagggattgtttgaaaaaccgttaaagattgttcgtaccatgccgaatacaccggcactggtaggtgagggcatgagctgtgtctgcggcaatgcaaaatgcagtagcgaagatgtggatacggtctgccggatctttgccggatttggaaaaacggagatcgtggaagaggatatgatcgatgtggtggtcggtgtaagcggaagttcaccggcgtatgtatttatgtttattgaagcgatggcagatgcagccgtggcagacggcatgccgagagcacaggcgtaccgctttgcggcacaggcggtactcggaagcgcaaaaatggttcttgagaccggtaaacacccgggggaactgaaagatatggtctgctctccgaagggaacaacaatcgaagctgtccgggtgctggaagaaaaaggactgcgaagtgcggttttcgaagcaatgaaagcctgtgtaaaaaagggacgggaagtataaaatatagaaatataatgcgtatttaagaagaacatgacagacgattgaaggatatgcagggaggaaagcgatgagtaaagtatatgtatttctggcagatggatttgaagagattgaaggactgactgtagtagatctgttgcggcgggccggagaagaggtggagacagtatctatcatgggaagaaaaatgatcgaaggttctcataagatcaaagtggaagcagatgccctctttgaagaaacagattttacagagggtaaaatgctgattctgccgggaggaatgcctggaaccagacatcttggtgcatacaaaccgctgacggatatgctgtgtgactgggatacaaaaggaaaacaactggcagcaatctgtgcggcaccaagcgttttcggggatctgggtatcctaaatggaaaagaagcggtatgttacccaggatttgaagagagactgaccggagcaaccatcggagaaggaacagtagcggttaccgatcatgtgatcacaagccgcggtatgggaacggcaatagactttgcagcggcactgatcgcacggctgcaggatgagaaaaaagcagaggaaatcaaggcatctattatttacagacagtaatgccgtgatggaagcatgcacgtttccgagagaaattgtgcaaagagtcttaaaaatcaggaaaaagcccttaaaaccgcaaaaaaagctggcgtttttaaagggcttatgatatactactcagatgtatgagtatggaaaaatctatgcaaaggtgcaggaaactgaaaaagagcctgcaattagcaataatacaattagaaaatgatttccataagaaattgaaggaggaactatagaacatgagcgtagcagtagaaaaactggaaaagaacatggcgaaactgacaattgaagtttccgctgaagaactggaaaaagcaattcagggtgcataccagaaacagaaaaacagaattaacatcccgggattccgtaaaggaaaagctcctcgtaagatgattgaaaaaatgtacggcgtaggcgtattttatgaagatgcagccaatgctctgattccggaagcatactccaaagcactggatgagtgtgaagaaacaatcgtatctcagccgtctatcgctgttacacagctggaaagcggaaaaccgttcatcttcacagcagaagttgctctgaaaccggaagtaactctgggtgagtacaaaggactggaagttccgaaggcagatctggaagtaacagaagaagagatcgcaggcgaactgagaaaagaacaggaagaaaactccagagtactggatgtggatgacagagccgttgcagacggagataaagtaacactggatttcgaaggtttcgttgatggcgaagcatttgacggtggtaaaggaacagattatccgctgaccatcggatccggatctttcattccaggatttgaagagcagctggtaggtgcaaacatcggtgaagaaaaagaagtaaacgttactttcccggaagattatcaggcagctgaactggctggaaaacctgcagtattcaaatgcaccgttaagaaaatcgaagtaaaagaactgccggaactggacgatgagttcgcaaaagatgtttccgagttcgatacactggaagagtacaaagcagacatcaagaaaaacctggaagagaaaaaagctgatgcagcaaaacgtgcaaaagaagacgcagctgtagacgcagcagtagcaaacgctaccatggagattccggatgctatgctggatactcaggttaatcagatgattgatgacttcgcaagaagaatgcagtctcagggactgactatggatcagtatatgcagtttacaggaactactctggcttctctgcaggagcagatgaaaccacaggctctgaagagaattcagacaagactggttctggaaaagatcgcagaagcagaagctatcgagatcgctgacgagaagatcgatgaagagatcaacaaaatggctgaaatgtacaaaatggaagctgacaaactgaaagagatgctgggcgacgctgagaaagaacagatgaagaaagatatggctgttcaggaagcagttactattctggcagatgctgcaaaagaagtagaaaaaacagaagagtaagaagtaaaaacccgcatccattctacgaatagaaggaaggcctgaatatgagtttagtaccttacgttgttgaacagacaagccgtggagagagaagctatgacatctactcccgtctgttgaaagaccgtattattttcctcggtgaagaggtaacggatgtgagtgccaatctgatcgccgcacagatgttatttctggaatccgaagatcctggaaaagatatccagctgtatattaacagcccgggtggatctgtaactgccggtatgatgatttatgatacgatgcagtatatcaagtgtgatgtatctactatctgtatgggacttgctgcaagcatgggagcattcctgctgtccggtggaacaaagggaaaacgtctggccctgccaaacgccgagattatgatccatcagccctcaggtggagccagaggacaggctacagagattcagatcgtagcagatcagattctgaagacaagacacagattgaatacgattctggcagctaacacaggtcagccgctggaaaagatcgcattggataccgaacgtgataactatatgactgcagaagaagcaaaagcatatggtctgatcgatgatgtgatcacaaagagatgaaaataaagtaaagataagagggggctgcctgtacaggtggcgccctcttataagtatcagaaaggaaataggaaacctatggcaataaaaaacggggattataaaattcgctgctctttttgcggaaagacagaagatcaggtacgcaaactgatcgcaggtccggacggatcttatatctgtgatgagtgtgtggaaatctgctcagagatcattgaagaagaagttgccagagatcggatgtccggaagtgatattaatctgatgacgccgatggagatgaaagaagttctggatgaatatgtagtcggtcaggacgaggcaaaaaaggtactggcagtctctgtatacaaccattacaagagaatcctctcaggcagaaaaaatgatgtggaattgcagaaaagtaatattctgatgcttggtcctaccggttccggtaaaactttcctggcgcagaatctggcaagaatgctgaatgttccctttgcgatcgcagatgccactacgttgacagaagccggttatgtaggagaagacgtggaaaacattctgctgaagattatccaggccgctgactatgatatcgagcgggcacagcagggaatcatctacatcgatgagattgataaaattacaagaaaatccgaaaatacttccattaccagggatgtatctggggaaggtgtgcagcaggcacttctgaaaatcgtggaaggcacggttgcatctgttccgccacagggtggaagaaaacatcctcagcaggaatttatccagatcgatactaccaatattttgtttatctgtggtggtgcgttcgaaggtctggaaaagatcatcgaaagtcgtatggataccaagaccattggatttaatgggtctctcggtatgaaacatgaaaaaaacgtgggcgagatcctgaaagaagtgatgcctcaggactttatcaagttcgggctgattccggaattcatcggacgtgtaccggttgtggtatctctggatgcactggatgaggatgcactggtacgaatccttcaggagccgaagaattctctggtaaaacaatacaaagcattgatggatatggacggcgtggatctggaatttgagccggatgcacttcgggaagtggcaaaaacagctatggagagaaagaccggagcaagaggtctgcgttccgtgatcgaaaagactatgatggatgtgatgtacgaagccccgtccaatgaaaacatgaaaaaatgcgtaatcaccaaagaggcggtaactggcaaaggaaaaccagttgtgactatcgaagagaatccggaaaaaaagccggcacgttcctccaaaagacggggaaccaagagagcaggaagaccggaaaccgcctgacgggaggtaacagatgacaaatgaaacacaggtaatgccggcagttgccctgcgtggaatcacgattttaccagatatgatcgttcattttgatgtgagtcggaaaaaatccatccgggcaatcgaagaggctatgatcaaagatcagagaatctttctgatcacccagaaagatccgaaagtggaagagccttcagaagatgatctgtataagatcggtaccgttgccatgatcaaacaggtagcaaaagcgccgaaagatatgcttcgtgtgcttgtggaaggtatggaacgggcagaactgatgcagctggaagacggtacatcttatctggaagccgaagtagatgtgctggagcaggaagaagagaatcttccggatacggtaaaagaagcgatgcttctcagtatgagagaactgttcagtgtatactgcaaagaaaatcagaaaatgaatcaggagcaggtgagacagacactggaaatcgatgacatcacggatctggtagaccatattgctgtgaatatcccgctgacgttccaacagagacagcagattctggaatcggcatctttcagtgaacggtatgagattctgggtgtgattctgtcaaatgagatcgaagtgatgcgtcttcgcacggagattcaggaaaaagtaaaacagcggattgataagaatcagagagactatatcctccgggaacagctgaaactgatccgggaagagctgggagaagatgacaccgtatctgacggagatcactttatgcaggaagcagaaaaactgcaggcaccgaaagagatcaaagaacgtctgatcaaagaaatccgccggtttaagagccttggctataacaattcagagagcagcgtgtcgagaggctatattgagacactgttaaagctgccctgggagaaagcatccagagataacaggaatctggataaagccagtcagattctggaggccgatcattacggtctggaaaaagtaaaagaaagagttctggagttccttgctgtgcggacactgacaaagaagggaagtagcccgatcctctgtctggtcggaccgcccggaaccggaaagacatcgatcgcgcgctcagtagcccgatcattgaataaaaaatatgtccgaatcagtcttggcggtgtcagggatgaagcagagatacgcggacacagaaggacgtatgtgggagccatgccggggcggatcgccaacgggctgattcaggcaggtgtaaaaaatccgctgatgcttctggatgagattgataaggtaagcagtgattacaagggagatacggcatcggctctgttagaggttcttgactctgagcagaacagtaaatttgccgatcattatgtagatcttccactggatctttcggaggtactgtttattgcgacagcaaatgatcctcaatccattcctcgtcctctgatggatcgtatggaagtcatcgagatttccagttatacggaaaatgaaaaagaacacattgcgagagaacatctgattccaaaacagatcaaggccaatggtctgaaagaaagccagctggtaatcggggatgaggtattaaaagatattattgaaggatacaccaaagaagccggtgtgcgtaatctggagagaaaattcggtgagatctgcagaaaatctgcaagaaagatcctgcaggaaaaagaaaaacaggtggtaataacaaaagacaatctggaagattttctgggcagatcccgttatacctaccagaaagtcaatgaaaaagatgaggttggtatcgtgcgtgggctggcatggacaagtgttggcggagataccttacagatcgaagtcaatctgatgccggggaaaggagattttcttctgaccggacagcttggagatgtgatgaaagagtctgcacaggcaggtatcagctatattcgttctgtggcagaccggtatggtatcaagccggaatttttcaaagagcatgatctgcatattcacataccggaaggagctgttccgaaagacggaccgtctgcaggtatcactatggcgacggcgatgctctccgccatcaccggacgggctgtgcgtgcaaatcttgccatgacaggtgagatcaccctgcgtggacgggtacttccgatcggcgggctgaaggaaaaaatgctggctgcaaaatacgccggtatcacaaagattttagtgccggatcagaaccggccggatgtggaagaaattgatggagagataaaagatggtcttaccattgtgtttgtagaaaagatggagcaggtgctgaaagaagcactggtatagaaggagaaacctatgattataaaaaatgtatctctggatatcgtgtgcggtatcaccagtaagatgccggagaccggaagaccggaagtggcattcgcaggaaaatccaatgtgggcaaatcttccctgatcaacggactgatgaaccggaaatcccttgcacgtaccagcgccgcaccgggaaagacacagacgatcaacttctataatgtgaatgaagcgatttatctggtggatcttccgggatacggttatgcaaaggcttcggaagaaattaaagcaaagtggggcaagatgatcgaagattatcttcacaaatcaaaagagatccgctgtgtatttctgttggtggatatccgccatgagccgggaaacaatgataagatcatgtataaatggattctggatcatggttatgaaccggttattattgcgacaaaactggataagatcaagagaagccaggtgcaaaaacagataaaactggttcgacagggactgcaggtagtaccgggaacaaagattattccgttttctgcccagaccaaacagggacgggaagaaatctgggaactgatcgacgaactgacaggaatggcagagcaggagaagactccagaggcataaatcctttacatcgtggagcgtactgctgagaacggagtgagcagtaacaaatttgcgaattccaacaggaaaaacttgtaatataaaagaaaatcagatacaattaggcttgatatgcgaaaaaacacgcaatcaggcctatttttctgtggcagtcgctatagaaaaaacaaaggtaactattcagtagccactgtcccgcgaggtgttttgacatgaatatgtcaaaatcccgaggcatacaagccaaaatgccatcaccgaaggtgatttttaatgcattttggctcgtaactgtgaaggtactgaacagttacaaacaaagaataacaatttcgtaagaaagaaatggagaggcaatgggaatcataaaagcagcaaaactggcctttgactatctgcgatacgaagaagagggtgaagaaccggaagttaacagagccattgaccacgtggatctggatatagaggaaggaaagtttatcgctattttaggacataacggaagcggaaagtccacgctggcaaaacatatcaatggtttgctggtgcctacagagggaactctgtgggtggatcacatgaataccgcttcggatgcagatatctggaatatccgtcagaaggccggcatggtttttcagaatccggataatcagatcatcggcacagttgtagaagaagatgtgggatttggcccggaaaatctgggtgttcccacagaagatatctggaagcgggtggatgagagtctgaaagcggtggggatgaccgcttaccgccatcattcaccaaacaaactgtccggcggacaaaaacagcgtgtagctattgcaggcgttatggcgatgcatccgaaatgtatcgttctggatgagccaaccgccatgctggatcccaacggacgaaaagaagtactgaaagcagtacgggaactgaacaaaaaagaaggggtaacggttattctgattactcattatatggaagaagttgtatttgctgacgatgtgtatgtgatggatcgcggacacattgtgatgcacggtgttccgaaagagattttttccagagtagatcagctgaaaaagtaccgtctggatgttccgcaggttacgctgctggcgtatgatctgaaagaggcaggtcttgcaatcccggatggtattctgacaatcccggaacttgtggatgcactgagcagaccggagattcgcgtaccgaaaggctggaaactgccggagcataccccgaaaaaagaaaagaaagaactgccacaggggaaagaatctataaaactggaacacgtaggatatacttataatccgggcagtgcttatgagatgcatgcgttaaaagatgtcaatctggaaataccgcagggacagtttgttggaatcatcggacataccggaagtggaaaatccaccctgatccagcattttaatggactgatccgtccgacagaaggacatatttattttgagggacaggatatctgggcagacaaatttcctcttcgtggactgagaagtcaggtaggactggtcttccagtatccggaacatcagttgtttgagaccgatgtactgaccgacgtctgtttcggaccgaaaaatcagaatctgccaccggaggaatgtgaaaaacgggcaaaagaagccctggaacatgtgggactggacgaaagttattatgcgaagtccccgtttgaactgtccggaggacagaagcgaagagtagccattgccggtgttctggcgatgaatcccaaggtactgatcctggatgagccgaccgcaggactggatcctatggggagggatgagatccttgatcagattgcaagtctccatgagacaagaggaattaccattattctggtatcccacagcatggaagatattgcgaaatacgtggagaggatcatcgttatgaatcacggagtaaaaacttttgatgatgcaccgaaaaaagtatttgcacattataaagagctggaggccatcggacttgcggcaccccagattacttatatcatgcatgcattgaaagaaaaaggactggatgtggataccagtgccatcaatgtagatgaggcgaccacatcgatcctgcgggcactctggaaaaaggaggaagatcacaaatgatgcgagatatcacaatcggacagtattatccggcagattccattcttcaccgtctggatcccagagtaaaattcgtgagtacgttggtctatattgtatctttatttgtattttcttcctggctgggatacggggtggcagcactgtttctggtggcgatgattgttttgtccaaagttcctttcggatttatgataaagggattaaagccgatcatggtgctgttgctgattacgatgttttttaatctggtctttacgccgggcgaagtattatggtcattctggatcctgaaaattaccaaagaaggtatccggctcgccatcaagatgggtatccgtctggtatttctgatcatcggtgcatcgatcatgacactgactactacaccgaaccagttgaccgatggtctggaacgactgcttcggccgctgaacaagattcatgtgccggttcatgagattgccatgatgatgtctatcgcccttcggtttattccgattttgatggaagaaacagacaagatcatgaaagcacagatggcacgtggagccgactttgagaccggtaatctgatccagaaagtaaaaaatatggttccgctgctggtgccattattcatctctgcctttcgcagagccaacgatcttgcaatggcgatggaagcgagatgttaccacggcggtgacggaagaacacagatgaaaccgctggcatatgaaaaaagagattatctggcatatctggtagtggcaggttatctggcactcagtatcgtatttcgggtagtcgggatttaaaaagtaaccggttgacagtattctgtgagatgctgaacagttatgaatagaattgattggtgaagcaagctgttttccggttcatgatgggccggagaacagcatttttactttacagcaaatagttatatttgtgaaaacgtggaaactttgaaaggaagaaaaatgaaaagagtaaaattgacggttgcctacgatggaaccaactactgtggctggcaggtacagccgaacggtctggcggtgcaggaagttctgaaccggtgtctctcagaatttctcggaactgagacagaggtgatcggagccagccgtaccgatgccggtgtgcatgcgctgggcaatgtcgcagtttttgacacagaggcacggatgcctgcggagaagttttcctatgcgctgaatacacggctgccacaggatatccgtatccaggattcctgccaggtgccgaaagattttcatccgcggtttcaggaaaccataaagacatatgagtataagatctacaaccggcagttcccggatccgacgaaacggctatacacgtatttttattattatccgctggatgtgcaaaagatgcggcagggagctggatatcttatcggagaacatgattttaaaagtttttccacctataaaccggaggtggagaatacggttcgtacgatctatgaacttgacattcaccggtcggaagataatgtgatcacgatacggatcaggggaaatggatttttgtataatatggtgcggatcatagcaggaaccctgatccgtgtaggtggaggttattatccgccggaacatgtcaaagagattctggaaggaaaaaacagagagcttgccggagagaccgcgcggccggaagggctgactctggtagagatccggtatccggaatgggaggcgaaaaaagatggacatctcgtatcagtggatccgctctcgcagaaagacgattgcgattcagattgaccggaacggacaggtgattctgcggacgccctatgggattacgaagaggcaggcggaaaaatttctggatgagaagaaggactggattctgaagaacatccggcaggtggaaaacagaaaaacagatcagattatgatcagtgaagaacagcgtcgggaaggaatcgagcgggcgaaacggatttttccggaacgaacagcatattttgctttgagaatgggtgtggattatggcaggatcactatccgggaacagaaaacacgctgggggagctgtagcagcaagggcaatctgaactttaactggaaactggtactgcttgcaccggagctgctggattatgtggtggtacacgaactggcacaccgcagggagatgaaccattcgaaggatttctggaaaatcgtggaggcagaacttccggattaccgggaacgtcgcaggagactgaaagagtgccggatctgagaggtttgaaatgccggagtgtacggttgaggtcaggagatcctgaaaagtgtcaggaaaccgccagagttcatcggtaatgacccgcaaggtgtttttggtgagtgaaagtcaaagaaagctgaaaaaacctggaaaaatcacgaaaaaatgattgacacacacggaacagtatactataataagcgagtatgacgtagtgcgaaagtatcttaccaaagccccggaaagatatttttcattatagagataattatagtttaaagattgaattacaggagggaaatccatgaacagttttatggctaatccagataagattgaaagaaaatggtatgtagtagatgctgaaggctgcacattaggacgtttagcttccgaagtagcaagcgtattaagaggaaaaaacaaaccagttttcactcctcacgtagatacaggtgattatgtaatcgtaatcaacgctgaaaagatcaaagtgaccggtaaaaaattagatcagaagatctactacagccactctgattatgttggtggtatgaaagaaaccactctgagagaaatgatgaacaagaaaccagaaaaagtcatcgaacttgctgtaaaaggtatgcttccaaaaggacctctgggaagacagatgatcaaaaaacttcatgtatacgctggtgcagagcacggacatgaagctcagaaaccggaagttttaacattttaataggaggtaagtaacattggctactacaaaattctacggaacaggaagaagaaaaaaatctatcgccagagtatacctggtaccaggaactggtaagatcacaatcaataaaagagacatcgacgagtacttcggactggagactctgaaagttgttgttcgtcagccactggcagcaacagacaatacagaaaaatttgacgttctggtaaacgttcacggtggtggatttaccggacaggctggagctatccgtcatggtatcgctcgtgccctgctgcaggcagacgctgaatacagaccagttctgaaaaaagctggatacctgactcgtgacccgagaatgaaagaacgtaagaaatacggtctcaaagccgctcgtcgcgcaccgcagttcagcaaacgataatctacagcttaaaaatgctaaaaaagcccggaaatacgctattttccgggctttttctatgcctaaaatcacctgattccgatggtgaaatttgaggaaatttgacttcatattagcccattttgatgggtttacagaaggccattttggaggggaaattagccccgcgagttctgacgaaatctgaaaaaatttaatatcaggtatcctgttacatagagccttggctcattctttgaaaacgagaatgggtcgaggctctatttttttcgcccgaaattcggcgagacaaatttgagcaggaggtaacaggtatgacggatttcaatcagaagacccatgataccgatgtgggcagcgattcttggaccttccggctgcggaagaaccacatttttgaagacgttaaatggtcttttggagcaggaacgcggtgtgaatgtgtccggcagaattatgttggaggaggcggatatccacagtctatccatggaagagttgagaaaaaatgtgggactggtgtttcagacaccggcactgtttccgttttctatttataaaaacctgacctaaaagctttcaggcggtcagaagcagtgtctgtgcattgccagggcgctgacggtggagccgaaggtactgctcttagatgaaccttgttcggctctggacgtgaaggcttctgccaaaatagaagagctgcttaagaacctgaaggagcgttataccattgtgattgttacccacaacctggcgcaggcaaagcgcattgcggacgatgtggcctttttccagaatggacggcgggtagaaacaaaggatgcagaaacattctgggaaaagccggagtgcgaagagacgaaagagtttttaaagggatgagttttatccgttctgttcagctcttcgtatggatggaaaccagatggccggtgtgaatacggaaataccggtcatttgcttgtctgtcgtgttttccacaatatggggaaggttggatcgaatcagcgtcgaatccccttccatcaggtgaattctctcggttccgatgataacatccagttctccggactggaccatgatgatctcctcactggggtgaatcacagggcgttcgccatccttagcatgtgcttccagctcaaaaccgataatcagagactggggaacaaattctgccgatggcatcggcgtcagcagatggtaacggatattggaatggggctgtgataaagtgatgacctgattttttctggtagtcagtgtgttgtcagcttcggcttctcccataaaaagataggtgggaacatccagagcagcgctgattttgcgaagcgttgacagggatggatccgtcagattgcgctctatctgggatatatagccaatggaaagtcctgtctgttcagccagggcttttagtgtaaagtctcttgattttcttatgttgcgtatctgctcaccgagcatattgtaacccccctgttcgatgtactttattctatgatcttcagcggaatccgctgtctgtattagtataccattgtttttgtaaataaaccagagtttgatttgttttatatatataaaaatattaaagtttactattctcctatttgccttattatctgtttcgactttggcttattttcacagatttatggaatattttttatgtaaaatccctaattttgtattttgaacgtgaaaaggttgactatatattttagtgagagtaaaattatactaattttaaaataattttacagtatggaggtctaatatgaaaattattgatgtaaaagtagaagtgattcacattccgatgaagaagccgttccgtattgcatttgccgtacaggatcattctgtgaatgttctggtaaaagttatgacagatgagggaatctatggaatcggagaggcagctccgtttgaaccggttaccggagagaacagtgcaaccgttctggaagttcttaaattgtttaaacagggtctgatcggtatggatccgatgaatattgagggaattcatctgatgatggatcgtctgatttccggcaatacctcagcaaaggctgcaatcgatattgcgctgtatgatctgaagggcaaggttatgaaccagccgctgtacaaggtactgggcggataccgtgaccagatcgtaaccgatatgacaattggtattgataagccggaactgatggcacaggaagcaaaagagcgtgttgagcgtgatggattccgtatcctgaaggtgaaagctggaattaatccggcggatgatattcgtgcacttactctgattcgtgaagcagttggaccggatatccgcctgcgtgtggatgcaaaccagggatataccgtaaatgatgcggtaagagttctgaaagaatttgaaaaaatcggcgttgacgcagtagagcagtgtctgccatggtgggatatggacggttccaagatccttcgccagaaggttgatatgcagattatgctggatgagtctatccattctccggttgatgcagcaaaagcctgcaagatggatgcagctgatattctgaacatcaaactgatgaagtgcggcggtctgtatccggcagagaagatcaatgcaatcgcagaagcaaatcatgtaaattgtatggttggctgtatgctggagacgaaggttgcgattgcagcaggtgtcagcctagttgcagctaagagcaatatcacagaggcagattgcgacagcttcatgtatgcagtagatccggagatgggaatgccgggtggcttcaccatcgagggtggcgtatatacactgtctcagaaaccgggtcttggtctggatctggatttctaattcggataataaatgctccgcggggatgcgctgaccgaagtcatgcgccaggcctcgcggaggttctcactagaaaggattacttaattatatggaaagtacaacattattttcatcagaaagcgcattgcttctggttatgtttcttatggtagctgtcggcttttggcttcaacgctttaaagtgttcaaggtgcttggaccggctttaacggttattgttaccggtattattctttcaaacttgaaaattgtaccggtgtccagcccgacctatgatgccctcagcagttattgtgtaccgctgtctatttctatctgtctgctgagcctggatctgcgtcagatgaaaaaattgttaaacagaaactcgattattgcactggcatcagcagcggtaagtgtctgcctgatggcattcgtgtttggtgttttattcgcatccaagattgatgagggatggaagattgccggaatgtttgtcggaacctatacaggcggaagttccaacctgacagcaatcgcagtcggactggatgcggcaaagggaaccatcgcagctgccaatgcagcagactatgtaattggtattccgagtctgattcttatgtttgcggcaccggctatctacaagaactctaagctgctgagaaagctgtggccttatgagatgacagaggcagagctgcagggcgatggagatcatgaagaactgatggcatctaaagagtggtccattcaggagatcgcatggctgctggcaatcggctttggtactgtatgggcagctacgaccattgcaggcatggtatttggaccgggcttccgcagtgcgggacgtattattctgattacgactttctcaattatcattgcacagattccggcagtacgtaagctgcgcggcaactttgacctgggactttttgtggcactgttattcctgaccaccattggattcgccgttgatctgaaacagtttttcggatctacattctatattaccttattctgcttctgcgttatcgtcagctgcattgtactgcatctgcttgtaacgagactgctgaaggtaaaattcgagtatgttcttctttctgctgtggcatgtatttctgacggcccgacagctgctctgattgcatcaagtgcacagtggaaaactatgattacaaccggtcttctgatgggcgttctggccggagcgatgggcaactaccttggtattgcagttgcttatgctatccgcggcatcatcggagtataacaggaacatagtaactgtgtacacatgtgtgcacagcagcgaatagggagatgaatcgttatgaaactatatcatttgtatgtatcgggaattctttatgcggaacttgattttgatacgcagccgatctccattcaaaaactggatattgcatcgggtaagctgcttccgtgggagactttgtcagaagaggacaatgccttttataaatcatttacaaaaattgacttattgaagctgtcacatcagctccatagctatgaacagaaacttgtgggagacggggaagtcatcgtagaactgccggaaggcgcagagcgctatacaagcagtaaggattcctggtatctgcagcgtgatatcaaattcccgaataacaagctggtagagaatggcgagctgcttgcagtgtgctgtccggcaagagaaatggttacggtgctggtacgggacggcgaggaggacagaacggttcttaaaatgtggaaaaacacctggccagatgagaaaatttatggagttaatcatcttggaagcttcccggttcctatgcgggacggcattcatctgtcaacggatgtttatgtaccggctgggctgaacgagaaggtgccggcggtactgattcgtacaccatatggaaaagaagatggctgtgaggtttactatcggtatgtacagcgcggctatgcagtcgtagttcaggatgtccggggccgtaacctcagcgaaggcgaatggattccgaaccactctgaggtagaggatggcgatgacactctgaactggattgcagatcagtcctggtcttcaggtagtgtcggcatggtaggcggttcctacctgggatatgtacagtgggcagcagcagccagcggtaatcctcacctgaaagccttgatcagcgtcgtatgtgcaggaagtgcatttgtggatctaccgagaagaggcggctgctttacctccggaatgcttgcctggggattcgctgtttctcagaaaaaattccatccggaactgatggagcgggatgactgggaagaagtattgaacatccgcccgttagatcagcttgcagaaaaagcactgggatatcatgttccgttcctggataaatggctggaaaatttagattatgatgaattctggcatcgttccaactggaaggagcgctctgtgcatgcgcagattccggctctcatccagtccggctggtttgatgataatggaatgggaacgacagaggctctggagcttgtgcatgatttcccggaaggcatgagaaaagtaattctaggtccgtggcagcatagcggaaacagcaaatacgatatgcatggagtatcatttggtgacgaggctctgcgctttgacttagattttatctatttccagtggtttgagcatcatctgaagggcgtagacaacggaattgataaaacagctccggttgagtattataccgtcggacaggaaacatggaagacagcttccaactggccaattccggagacccaggaaacagagatttacctggacagctgcggtcatgccaacacatcctccggtgatggagttctttcctttaaactgccggagaaggagagccaggacagctatgattatgatcctcagaatccgtcaactcatatcatcgatatgtctgaaaatgaaattgaggttccggaggactatacagaggaggagaaacgtcaggatatgctgtgttactccacggatccgctggagaaggacgtggtaatcacaggcgatataaccgtgtctctttacatcgcttccgatgcaccggatacggatttcatggttcgattaacggatgtagatgaaaatggccgttctatcaaactggcagatggtatcttatctgcgaagtatcgcaatggatttgaccatgcagacttcttaaatccgggcgaggtagttccgctgacaatcctcacgacgaagatttccaactgctttaagaagggacatcgaattcgcgtgacgattacctccagtgcgaagaactttgtattcccgaacagcaatacaaaagacggtttcaacagccagacaacggttgttgcacataatacaatcttccatggcggacagtatccgtccaagattacggttcgtatggagcagtaaggcattttcgaattttgcaaacagggtgtcggtatttcaaatgtcggcatcctgtttatttgcaaaaatagtgttaaaaaaggttacagcaaacaaggaaatcgtatacaattaaacatgagaagtggtattgaccgaaaggaggtgcagtacggaaacggccgttctctttggaaaatatcaatccggttaacagaacagtatttaaacctctcaattcggcgcatctgctctatgcgggcgttgacccaaagacagttcagtatttggcagggcatgagaatagtaagacaactatggacatttacgcgagggtcaagtataataaaccagaggaacttttcgaggtagtgaatgatgctttgaaccaggagaatttcgatgaaaaattaccgatttctatggttaaggaataggacaaccgacaacagaaaatgcgaaaaagcccgtaatatcaaggaaaaacgcaccatagagatgtttaatacggtctcaaagcagctcgtcgcgctccgcagttcagcaagcgataaccgactgctcagactatatcaaaaggtttacaaaaccccggaaaatcaaggctttccggggttttcttataccaaaacttatctgtatagttagaccctatatccatgctgaacgcaccgaatgtcagatgttatgcggcagaaagaatttctcaatggaaagatgttatgaccaatagcttgctgaattcgcaggtgcaagtgggcgtagagatgtggagatacaatccacgaaaattgtccacacgaaacattgtagatgagctttcgctggcattggcattgagagaagatgcagatgaacgggttgaagaagcagtagaagaaatgatgaatgaactgtggaggaagatagatagttacaggaattgatagcgttatgaaatggctcaatagacaagagcattgatcagaagaatgggggtatgtttcatgccattgcagattatcagaaacgatattacaaaaatgagcgttgacgcgatcgtcaatgctgccaacacttctcttttgggcggcggcggtgtggacggctgcattcatcgtgccgccggactggacctgcttgcagagtgcagtacgctgcatggctgcgagaccggaagtgcaaaaatcacaaaggggtatcgtttaccctgcaaatatgtgatccatgcagtcggtccgcggtggcgggatggcaagcatcgggaacaggagcttctggaatcctgttatcggacatctttgaacctggcgaaagaaaatggctgtcagtcggtggcttttccgctgatttcctctggcacttacggctatccgaaagaccaggctctgaaggttgcagtcgataccatcagcacattcctgctggagaatgagatgatggtctacatcgttatttttgataaaaaggcatatcagattagcggaaaactatttgctgatatcgcggcgtacatagatgaccggtatgtggatgaacataccgacagccggtcagaacagagccggcggctcgaaggattgtcagaggaaccctgctttgaagctgcacctgccccgctgccgaccgaagcaatctgtaaatcttgcagcagccaatctctggaagaggcactgggacagatggatgagagcttttcggaaatgctgctgcggaagattgacgaaagcggcatgacggatgctcagtgttacaagaaggcaaacattgatcggaaactcttctcgaagatccgttcggataaattctataagccatccaaacctacggtgctggcatttgccctggctttggaactgccgcttgcccagatgcaggagatgctcggtaaggcagggtttaccctttcccgttcgagcaaattcgatatcattgtagaatattttgtcgaacggagaaactacaatgtgtatgaaatcaacgaggcactgtttgctttcgaccagagcctgatcggagcataaggaaaaagaaatgtcgctttccatgcgaccactccacgaaagaaaatcgctatactatggctgtaagatacgaaaccgagcagccatatgcgcgtgtaatgagccaaagttcgagcttgctcgaaaccttggcgaataccgcgacagcgagcccgcaagggcgagattttgggaggacaagcatatgagaaagaatttaacagagatcgtttttatcttagaccgcagcggttccatgagcggactggaacgggataccatcggcggattcaattctatgattgagcagcagaaaaaagcagagggcgaagcactgatctcaacggtgctgtttgacaatgtgagcgaagtcctgcacgaccgtgtaaatgtaagggacatccgaccgatgactgaccgtgattacacggttcgcggatgcacggcactcttagatgccatcggcggtgcgatccatcacattggaaatgttcataagtacgcaagaccggaggatgtgccggaacacaccatgtttgtaatcactacggacggaatggaaaatgctagccgtcggtacagcagcgaaaaagtgaagaagatgatcgagcggcagaaagcaaaatacggatgggagtttttgttccttggtgccaatattgacgcagtagagaccgcaagccatttcggaatcggtgcagatcgtgcagtcaactatcagtgcgacagcgaaggaaccgcgttgaattatgaggtggtcagcgaagcaatcagctctgtccggtgcagtgccaagctgagcgcagattggaaaaagcgtatagacgaggactacaaaaagcgtggaggccgcaagtacaagtagagttttttgaagccgacgacgatcggagcgattgtgatgatgccgttcatggtacttatgtatcaaaaagttatgtaaactttatggttagtaaaagaaccgcctccaggctatctcagccaggaggcggttcttattctacaaaatgcactgacagtgttatttctggtcgcgttgattttttcgatgcatcaggaataacataaataacagaactaccggaaaaataagcccgcatcccatgccgatccgaatattattttcagaattctgagtgatacggccaacgattccgggtccgatactgccgcctaaatctcctgccatggcaaggagagagaacatagctgttccaccttttggaaaagttttcgaagaaatactgattgttcccggccacatgattccaactgaaaatccacatacgatacaaccgataagtccgatagtcggattagatgacaaggcagaaagaagatagcagataacacataatatgccggaaccacccataaacttcattaaatccagttgttctccatattttccaaaaattatgcgactgattcccatggtgactgcaaacatacatggacctgctaaatctcccagtgtttttgataacctcagtgcagattcggcataagcagatgcccattgagccattgaaagttcagaagccccagaacagatcatcagacatatcgcaacccagaaaaacggtttggcaaatagacttctaattcccattccggtaccattgtcaaccagatgctcaatcggacaggtcatgaaattataagtgttcacagccggaatgagtgcccatatcacagcaagccatttccagctgtttattccgaatatcaggaaaaacaggctggaaattaaaattgtaccgacagcgccccaacagtaaaaggaatggagcaggctcatagttgcttctttgttttcgaatggacaggcttcaataataggactgcaaagtacttcgatcaagccacttcctatagcatatatgatgacactacatagaattccaatgaaaggatcaggtaaaagatcaggtaaaaaggccagtccaaccagacccagtgaagcaaatatttctgatgcaacaatgcaaacacgatatccaatataatctacaaatttggcacagaacagatcaaccagaagttgtgtgaaaaagaaaaaagtagatatcaaagcaatattgcccagagaaatatgataatcattatgaaatttcaaaaaaagaagcggtgcgaagtttgccgcaatagcctgtgtgataaagcccatataacaggctatttttgtcttatggtagtcatttttctttatagcattcattttctatttcccactccgaatgtttttaacagttttacgttcaatagaaagatgttcgtaaatacgttttccaccatttccgcttggagcttgagcaagtaatccgactttgatgattggtttagacggcaaatggaaataccgcatcatgtaatagtttgtactgtctgctgaatagtggaatgcaaaattatttcctactctgcatacctgaagccaggcagaattgccttcaaggttacagccgtttgcatcatctgaatcgccttttgtaacaacacttacagctgcatgggttccaaaatctgtcagttcataacaacattttgcccaatgactgtcatctgccattatcattacagaagcagaatcataggtttctttaaaatcatgagatacttttaccttaagaacaaagtccccatcaatttcagtataataatatggggcattacaaagtgattccggcaaaataccttcttcacattcatcaatgctgccacaaaaaaagtctgtttttggtggtgcagttatttcaattctgtcgccttcaatattgattgcactttcattcatccatttaaaaatcataagaatacctctttcctttttttgtttgattatatagcaaatgtgagccacatacattgaattaaatcgcacaaatactgtataatatcgtaaaaaagaaagaatgtgatatgaggatggattataataaaacatataataaaatacttacagacgaggagttcatggaaatcaaaccccatggcagcagtgattaccctttccagtattattatgataatctggaactgtttgattttcattgtattgaatggcactggcacagagaatttgagtttttatatgttgaatctggaaaagtcctatgtggaataggtgaaaaacagattatattgtcagaaggagatgcaatttttatcaattctaaaatactgcatcggttttatgcagcatccggtggtgtcattcctaactttgtatgtatgcctgaatttattgcgccggagaatagtttggtctataaaaaatatattttaccaatcatttcatcgaatatggctttccagtgttttcagagtgctgaaccatggcaggcaaggattatacaaattatgataaaaataatggaaacacaggagaatgagataataagggagctttccactttggcattgttgcagaatttatggctgattttttatgaaaatgtaaagttatcggataaagaaaagatgcagacagtagatgaggcagcacagaaaagggtacagctgatgatgcaatatatacatgagaattataagcacggactgtcgttgaatgaaatagcttcacatataggagtcagcaaaagtactgcgcttcatttgtttcagcgatttttacatactacgccggtgaattatctgatagaatatcgtttacaggcagcttcccggctattgaaaaatacgaataaaaaagtaaaaacgatcgcttatgaaagcggatttcataatgtggactatttttgcagattgtttaaaaatcgctatcatgtaacgccatcagaatatcgttgtatatgattaaaatagtatattcgtaattgtgaggaaaatttttttgacctaagacaaaggaactggaaaaatcaggaagagtctgcgatacaatattcattaaggaagagtgaaagtattttacacaatcaccgagtgaaacaatatatttttacctggtaaaatatacagaaagattacaagttaaaatgtgtacataaaaaatagccaatatagacaaaaaacattaattaagcggcaacaaccacaaaatgactaataaaacagtaatgggattatgcattatgcatagcatatgtatggaaaataaaatcttctttgtacaccaaaaccaaattatccttgctatttatagtgacttttattataattaaaagtgcgtgattatgcgtctgtatagtattgtgtacaaaattcggagaacagaaatgcagcagattattttagggagtgcagggtttcttctgtactttatttacgatataaacagtgttagaaaacagaacaggttgttacaaaaatttttcgcagcgggcactattctggttgttttgtcactgtttatggaactttggtttgcatggggacagtgcagtcacaggatcggaagaatgattggattcggaattggagcaatgtgcttttgggcacttcttatatacaccttgtttttcgctcttccttttgagcaaacctattgtgaagaaaacagattacgggctgcatacacagaaggggtgtatggattgtgtcggcatcccggcgttttgtggtttgcaggtgcatatctttgtatgtggggaatgtttggcggatggaaacagggaatctattttttacttatgattttttggaattatctgtatatcatttttcaggatctgtggacttttccgcagacgttttttaattatagagaatatcagaaaaacactccctttttaataccaaataaagaaagcatacaggcatgtttctatagtgtcagaaaacaatgatcgatctggagcggacagactatgaatttagaagaaaaattaaaaaaacaacagtataaagaaatctggcagcagtactgtggattccttgatttgtccatggatggatatatgaagattcaacggcgattgatggaggagcagatccggttatggagtaactgtggtctgggacagtccattttgaagggaaagcatccgacgaatctggatgaatttcggaaaatggtgccattgacaacctatgaagattatgcagatgtattgcttaccaagcagccggatatgcttccgggcaatccggttatctggatccagacgacctgggagggtggtaagcatcctattaaggtggcaccctataccagaagcatgctggatacctatcgcaataacgtgacagcatgtctgattctttctaccagtaaagaaaagggctcttttgatgtggcagctacagacaaatttttgtatgccctggcaccgttgccttttgcaaccggactttttccgttggcattgggtgaggagatcgggattgaatttttaccggcagttgatgaagctgtaaatatgagcttcagcgaaagaaataaactgggatttaagatggctatgcaaaaggatcttggatttttctttggtcttggaagcgtggcttacgcagtgagtctgagcctttcttctctgaccagtggcggaggtggcggtatcaaactgtcaagccttatgaaatgcaagcctcatatgatcttacgtatgattcaggcaaagcaccggtgtaagaaagaaaacagatcatttcttccaaaggatttgtttcatctgaaaggatttatggtggcaggtacggataacctgtgctacaaagatgatttggaagaactttggggcattcgtcccatggaattgttcgccggtacggagccttctattatgggtacagagacatggacaagaaagggaatgtatttcttcccggatactgcgttctatgagtttattacagagaaagatatgatgagaaattatgacgatccttcatatattccgcctacctatctgatggatgaggtgagacccggtgaaaagtatgagctggtatttacgatcctgaaaggcggtgcgtttgcccgttatcgttgtggagatatgtatcgctgtgtgggattggaaaatcgggaagatgagaccaggatccctcgttttgaatatgtggaccgggtaccctggatcattgatattgcaggtttcaccagaatttcggaaaatggaattcgaagtgtgatcagcctttccaaacttccgatcaccaactgggtggcagcgaaggaatacaatgagcagaaccgaccgtatcttcacatgtatgtggaactggagcaggaggcacttcttagcaatgccatgagtgccaatattttaaaggatttactgagtacatatttcaaatatattgatcaggattatcgggatctgaagaaaattctgggtatggatccgttacaggttacaattttcacctgcggaacctttgaagcttatgagaaaaagacaggcaaaaagatacatcagatgaatccttctcattatgatatgaaggaattactggatgtacaggaatatctaaataaagtaagataactgtgcaggcatggaacagttatgagtgaaacaaagaatgggataagggaaatttatgggaacctacggatatatatcaattatagccatgctgtgctatggctttctgctgttgatgtttttgacagcaaagaaaaataaaatcataaacagttttctggtggtattgctgggactgcttttctggacaggaggctctgccttcatgcgagcacagttctggccgggatgtgaattctggtatcagatttccctgttgggaatcttattactgccatatgcgtattatcgttttattcttgcctttggcggagtcaggaacggatccgccggtagaatatacctggtgaccatgctgatctgcttttgggtgaatgcccaatttggagtttttttggaatctcctaagatgatagaaaaaagaggggtacaaacctttgtatatgagatcaacccttctattattgtatttttcattccggcaggactttttctgatccacctttttgtaattcttgtacggatctgtaaagaaaaccctaccatgaaagttcagtatgagccggtgatgatgggggtacttgtactgttttttggcaatgcatttcttggaattccatttttcagcggttttccgattgatattttaagtggtgtggtaaatgtatttttactgttttatgcactgattcgaagacgattgtttcgcctccagatgctggcatctcccagtttgtgctatggcgtaggattcctgttttctgttcttgtatttttaaatatcatgccgtttctgcaaaagattctccatatgcagccggataataatatcaccatgtacacccttgtatttgccattgcttttctgattacctatgcaatctttacttatctgtggaagcttttgatccgcagtgtatttgtaagggaagagaaccatcaggcggagaagttaagggaatttaattcagcgatttcaaaaaccctggatcttcaggaaattctggatcgaaccatccgggtgatgaaagaactgatggatgtgggcaatatctatatatgtatgcagaaagcgcccggagaggcttactgtggagttgcaagtgaccagcctcttaacgatctggcattttctctggaagaagaaaatccgatgatacaatggttgaaagatcatgaagagccgctggtttacagggattttcgatattctgtagagtataagtccatgtgggaggaagaaaaacatcatctggataagaagcacacgcgctattgtgccggattaaaagacggtgatactttggcgggggtgatattgattacagcagattcagggaaaaagagattggtctatgatgaagtggaactgatctcaaacatcacatcggtggcttctattgcgattaagaatgcaagaatgtatgaaaaagcctgcattgaggcaagaacggatgagatgaccggcttgttgaaccggaaatatttccatgaagtgcttcatgaagaattcgaaaagaataaagatggatcgttggcacttgcacttatcaatgtagatgattttaagttatataatcagctgtatggtctgaaagaaggtgatctgtgtctccagcgtattgcaaaaatcatccagagcagtgtgggagaaaacggatatgctgcccgttacggtggaaaagaatatgctgttttgttgccgggatatgatcttttctctgccagaaatctggtggaatccattgaaaagcagatttctgttatgaataactccaggacggacatgaagctgaaagcaattacggtcagtgcgggaatcagcgcggcaccttatgcggcaaaaaatgtgaaggaactgatggagaatgtggatcttgcagtttaccatgtgaaacacagtggaaagaacgggatccaggtctttgataccatgttccgcaatgccaacaagaatatagtgtcaacaaaccgggcacatatttaccaggaatatgaatcaaccatctatgccctgacagcagcaatcgatgcaaaggatcattatacattcagccattccacaaatgtggcctattatgcaacagcgcttgcaacagcacttggcatgaatgaagatatggtggagatcattcgccaggcagcccttttacacgatgtcggtaagattggtatcccggagtatatattaaataaggccgacaaactgacagacgatgagtatgaaacgatcaagggacatgtggaggcttctatcgatattatccgtcatctgccttctctggattatgttattccggctgttatcggtcatcatgaacgttatgatggcaaaggatatccgcgacggatcgcaggagaggatatacctctgacggcacgtatcctgtgtgtggcagattcctttgatgccatgacatcaaaacgttgttataagaaggctttcccgctgaatatagcaagggagaaacttcttcaggatgccggaaaacaatttgacccggatctggtctacaaatttgtggaatgcctggataatgggacgattacgttagtgaaagctgaagagatatagaaaaaaaggcagcgttccatgtctgctgtgacagcagattatgatgaatgcacctgtataggaggtagatgcatgagaaaagagcaatcttatgcatctgctttttttacattttggctcgtaactgtgaaggtactgaacagttaccttatatttttaaactgtcaaagaatgtcgtgattgagcctttggcagtgacagagagcgtttaaaataactgttccgtgaggaattgttcaaaaataaaaacgcataaaacaaggaagtgtatatctttttcatacatagtttgttagaatatagcttgaggtttatgaaaccgaaaatagaatcttttgctgcagctaaataaagtaaatatttgtgaaaaagcagttgcagatgaaaaaatgggaagttttgtaatggatggatatttttatgtattaactacaattgatctttttgttttatgttttatgtgcatactcacacatctgagtgaatcgcttagcgaaaaacaaaagcgaggtttttttctggcctatcttatgatcgcaggaatttcagtgctggaggtcataacagtggttgtggatggtttgccgtccgggtaccgatggctgaatattgtgtctaattatctggggtttggcctgtcgccggcggtgtctgtctgtcttgtatatgtattggacagaaagacagctctccgacgcaagatcagaattgcagtgtgttgtgagatcgcatatcttatgtttctgctggtctctgttccatatggaatggtattctctgtgagtgtggataatatgtattcacgtggtccgcatttttacatatatgtcatcatgtattttggggcaattttgtatctttcgatatctacgatcatcacagccagagaatttcagaatcgcagcaggatactgatctatccattgattctttttgtgatggttgaaacagtcattcaggttgcactgcctgaacttcatgttacatggctatgtgttacgttgctttctgtattatattttatctattgtaatgagatgtggaatcagttggatgcactcacaggacttttgaatcagaacagctatttgaaccagacccaaaagataaaatacaacagtggagtgctggtagtgtttgatgtggatgatttcaaacaggtcaatgactgccatggtcacgtgaaaggtgatctttgccttgcgggtattgcggaatgcatcaaaaaagcatatgctgactctggatattgttatcgtataggtggtgacgagttttgtgtattactgaaaaacagagcgaaagaagaggaatgcagacaggaatttttgcggcggtggacagagaaacgaagaaagttcacatttttcccaaccgtttcttacggatcagctccattttcaggtgaagatattgcagttgtcaaagacagagccgatcaggatatgtatcaatataaaaaaggacgaaagaaacatggcagttcaggtgtgctgagtgagcaacaaaaatatcaaaactaacaaaagttcggatgcaaagtcccttgccaatcaccaatacatgtgttaatatactcgaaacacaatttgcactgcatatcaatctacagtacaaactgagcaggcgatggagatccatggggccgggcccgacaagggcagcagatgagaacgtgacatctgtgggacagtagtttacttatattgtcccatgggtgtttttttattgtaaagaagagtgatgatgaatgctgttttgatagtttatcagtcagaatgcagagattcaccagagaaaatattgataagcacgggagaataacaggaaaatgttgcaggcataagttatcaaaaacggaggtaaaacttatgaaacaaaaagatttacaggattctgcaaaacgtgcggctcttggaaagctgtccggcctggtggggattgtatgtaatgtcggtctggcgggaagtaagctggcagtcggaaaacttgcgggttccatgtcgattacagcagacggcttaaacaatctgtccgatgcggcaagttccatcgtgacgttgaccggattcaaactggcagagaaaccggcagataaagaacatccttacggacatgcaaggttcgagtatctggcaagccttacggtgtcggtgatgatcttgtttatcggattcgagctggcaaaaagttcggtggagaaggcgcttcatccggtggcagtagaattttctcttctgtccatgcttgtcctgattgcatcgattctggtaaaagcagggatgatgatctttaataccaggatgggaaaaagaattgattccacgacgctgatagctaccgcagcagacagcagaaatgatgtgctgacgacaacggcggttctgatcgctgctctgatcgagcatgcaaccggatggaaggtagatggtatcatgggaattctggtgtctgtctttattctctggagtggcatcggactggcgagagatacgatttccccacttctcggagaaggagtaaaatctgattttcggaaagaactgacagaagaaattatgacctatcccatggtacttggctgtcacgatctgatggtacatgattacggtccgggaaaacggtacgcgagtatccatgtggaatttgataaagatgacaatctgatggcgtgtcatgaagtggtggatcagatcgaacggaaatgcctggaagaatacggaacaaatctggttattcatctcgatccggtgatcacagacgatgtggagattaaccggatgcagaagctggtgaaacagtggctggtacagaaagacagccgacttgcgatgcacgattttcggatacattcgtgtgacgataagatcaaggtggtttttgatctgatgattccggatgaattgcaggggaaagaggaagaaatcaaagagtcactggagaactttttaaaccagggagaaggagaagagtatcaggcagatatcacctttgacccggaggcagactggtaaaaataaatatgggactgcgaaaaatcgaaagaaaaatgatagaaaaattattgcattttcctgtgaaatgattataatatcttagagcgtgtctaaaaaaggcttttcgtgagctgggagtctcagtttgtggaaatgatttttcagacacgctccaggtaaggaaaatcataagtaagaggataaaagaaaggaaaacaggaaatggaaaaaaacgggggaaacagtaccattcgggatatgacatccgggagtccggtaaaactgatcatacagtttatgattcccatgtttctcggaaacatctttcagcaattttataacattgcagattctatcgtagcaggacagtttctcggggtgcgggcactggcagcgatcggaagtaccggttcgctgatgttttttgtcaccggctggctgaacggactcagcagtggatttgcgattctcgtagcacagtggttcggtgcaaaaaaatacgaccggatgcgtcactatgtggcaatgtccatctatctgatggtagcatttgctgtagccatgacgataggttttgaaattgccaaccgtccgatcatgcatctgatgaattattcagaagagattatgccggatgtaacttcctatatgggaatcatctatgccggtctgatcgtaacggcagcctataacgcgctggcagcattcctgcgtgcactgggggattccaaatcaccgctctatttcctgattatttcagcggcaatcaatgtactgttggatattgtatttatcatctatgtgggcatgggagtggaaggctgtgcgtatgcaacggtgatcgcacaggcgatttcagcgattttatgcctgatctatatcgtgaaaaaattcccgattcttcatctgaaaaaagaaaactttacagtttcttttcaggagctgggaaaacttctggcactcggtattccgatggcattgcagttttctatcaccgcgatcggtgtcattgtggtgcagggtgcgatcaatgtatacggggaaaattacatggcagggttttcggcagcaggaaaactgcagaatattttcagtaccgtgtttgtcgcttttggtgcgaccatcgctacctatgttggacagaaccgcggagcggggaaaatggacagagtcaaacagggtgtgcgctgtacgcagctgatgatctttgtatacagcatctttgccatgctggtcctgtattttctcggaagacatatggcacttttatttattgatgcatcggagacgcaggtactggatgtggcggagacatatttccacacagtattctggtgctatccgttccttggaagcatcttcctatatcgaaacgccctgcagggactgggctatggtctggtgccgatggtcggtggaatctttgaactggtggcaagaaccggaattatcatgctggtagcaggacacaccagttttgccggggtatgtctggcagatcctgctgcatggatctctgcgctgattccgttaatcccctattatatctatacgatgcggaaatgggaaaaacagagaacagtgaagatgaccgcaaattaaattattttcgtgcctgctttggagatttgtgatatttgtttcgatacgcctggtagaaggttgtatagttgcgaaatccgctctgatagcaggcatcggtgacagaaacgccctgttcgatggcatggtttgccagatagaggcgtttttctgttatgtattttccaatcgtatatccggtttcgtcacgaaacagatgcatcagataggagcggttcaggaaggcagcatctgcgatcttgtcgatggacaggtcttgtgtcagatgagcattgatatagtcaagaatctgtaagatctgtggattggcggtgggaagaatcagagagagtttctgattttcctgcttcaacagataacggttcaacagcagaagatattctgcgaattttaacttctgataaaaagaagtaccaaaatcttccgaagaaaatgttcggatcagctcctgcaaaaccggatataatgaaccggaaaaataatcgggaatgcggatcagattttcatgagcttccagtgcatgggaaaaacagccggagaggtcacattccccggaaagggttgaaaaatagtccggtgagatatacgcgatcaaccgggtataggttgcactgggatgcaccaccgggcagtggatctcaccggcaggaatcagcacctgatcgcccggtttcagatcgtattcccggccttccacccggtaacttaccgttccgttcagaaagatcagcagtttgtggaaatcatgataatggtaggtatattcccgaccgggcaggtcttcaagataaaacagccggaacggactgttgagataaccgcttttctgataaatatctggcatggcagcctcctttgtgatatgctatataagcttgttattgtcagtatacagcactattttgaatatatacagcagaaaaagaaaatttatttgaaaaatttctgctataataaaagtatcaagaggcgaaaaacgaaaaggagtaaaggatatggccagacagattatttttcataaatatcagggaacagagaacggattcctgatctatgacatcagaaaaaatggtggagagatgaatgatggactgctgcatatgatccggagccgaaacttcggtttggatctggatggtattctggtcggaccatatctggtcgatggcagtctggagatgaagatgttcgaccgccagggacatgaagtaagtatgaaaaaagagagtacagatgtaccgatctcttatatgaaagaagcaggttatctcccgggagaatgtccgcagacggagcagagaccggaaaagatatactgctggtgttaaagccaggcaatagatgagtatggaacagttatgaaaaaagaatatcgatagtttcctatatggacgaatggacgaaagcccctttctgtgttatgataaatcgtaataattgcgataactattcagtagacaggatctgcgaagttactgaacagttacaaataacgacagaaaggggtattttcgatgggatttacatcagaaaataaaccggaaaaacagattacgatgggaatcctggcacatgtggatgcgggaaagaccactttgtccgaaggtattttatatacttgtaaagcgattcgaaagttgggacgtgtggatcaccaggatgcatttttagatacgaatacgttagagagaaaccggggaatcacgatcttttcgaaacaggcagagtgtacgctcggcgagttcggaatgacgtttctggatactccgggacatgtggacttttcggcggagatggagagaacgttacagatactcgactatgcgatcctggtcatcagcggagcggacggtgtgcagggacataccgagacactgtggcggctgctttcccgttatcagattccggttttcttatttatcaacaaaatggatcagccgggaaccgatcgggaagcactgcttgcagaagtaaaggaaaaattagatgcaaactgtgtggagttttccgcagatcaaacagatgaggaatggaaagaacaggtggcagtctgcgatgagcaggtgatggaagcgtatctcgagggagaggaaatcagcagagagcagatcaggcagatgattcgggagagaaaactctttccttgctattttggttcggcactgaaaatgaccggtgtggaggaatttctggacgatctgaaactccggatccgggagacttcttatccggaaacgtttggagcaaaaatttataaaatcaccagagacaatcagggagaacggcttacccatatgaagatcaccggtggaactctgaaggtaaaatcggtactctcaaacggcagaccgggagagaccggagagggcatctggcaggaaaaagtcaaccagattcgcatctattccggagaaaaatatacgatggtttcggaagtgaaagcgggcacggtctgtgcagtgaccgggcttaccgcgacctatccgggacagggactgggaagcgaacaggcatccgatatgccggtgctcgagccggtactttcctatcggatcggtcttccgacggaggtcaatgtgcatcaggcattgttacagcttcgacagctcgaggaagaagagccgctgttacatatcgtatggaatgagacgcttggagaaatctatgcccaggtcatgggagaggtacagatcgagatcttaaaaagtctgatcaaagagcgcttcggtatggcggtgacctttgatgagggaaatatcgtctacaaagagacgattcttgaaccggtagaaggggtaggacattttgaaccgctgcgtcattatgcggaagtccatctccttttggagccgggagagacaggaagcggtcttatttttgctgcggattgcagtgaggatgtgctggaccgcaactggcagcggctgattctgacgcatctggaagagcgggagcataaaggcgtcctgatcggtgcgccgatcaccgatatgaagatcacactgctgaccggacgggcacatatcaaacataccgagggcggggatttccgtcaggcgacgtatcgtgccgtaagacagggacttcgcaaggcgaaaagtcagttactggaaccgtattatgagttccggttggaagtgccttcggagcaggtaggacgaagcatgaccgatatccagaagatgctcggagaatttgatccaccgaagacagaaggcgagatgacggtgctgaccggatccgcgccggttgtcacgatgcgggattatcagaaagaagtgatttcctacaccagtggcaggggaagactctcctgtaccttaaaaggatattatccgtgccacaatcaggaagaagtcgtggaggcggttggatacgatccggaagctgatcttgagaatccgaccggatcggtcttttgtgcacacggtgccgggtttgtggtcaactgggatcaggtggaagactatatgcatgtggagagcggctggaatgcacccgccggtcaggagacgaaaccggagaaaccggtaacggcgaaaaactggaaagaagaaaatgaaaaatacctggcgaccgagaaagagctggaagaaatctttgagcgtacctacggtccgatccggaaacttggagaagaaccgccggccggcaggagtgtaaaaggctggaaaaagagccgccgggatccgctggaaggatacggaaaatcaagcagtgactataaacagaaaaaaacgccggatggagaaaaagagtatctgctggtggacggttataacatcatttttgcctgggaggatctgaaagaactggcagcagtcaacatcgacggtgcccgggaaagactgatggatattctgtgtaattatcagggattcaaaaaatccacgctgattcttgtatttgatgcttacaaagtgaaaggcaatccgggcagcgtggaaacataccataatattcatgtggtttatacgaaagaggcggaaaccgccgaccagtatattgaaaaaacggtgcatgagattggaagaaaataccgtgtgacagttgccacctccgaccagctggaacaggtcatcattctgggacagggtggacagagaatgtcggcacgggaactgctggaagatgtgatcgaggtcagccatcagattcgggagactgcaagacaaaaacgttcttcagataaaaattatctgtttgaccatctggacgaagaaacagcagcacgtatggaacggatccgtctgggggaggaagaggtttgagatactatatggctcccctcgaagaggtgacgggatatgtttttcgcaatgcatatcatgcacatttgtatccttttgataaatattttgctccgtttgtcgcagcaaaagaacaaaaggagcgactttttaattacaaagaacgaaatgatatcctgccggagaataaccggggaataatactgatcccgcagattctgacaaataacagtgaggcttttatccgcaccgcaagggggatgcgggaatatggctatgaggaaattaatctgaacctggggtgcccttcgaaaacggtggtgaacgggggcagaggttccggttttttacaggacagagaaggactgcgtaaatttctggataagatttttgaacagctggacatgaaaatttccatcaagaccagactggggcgttatgagccggaagaaatcggaccactgatggagatttttaacggctatccgctggaagagctgattattcatccgagggttagggaagatttttatagtggaacaccacggctggatgcattttccggggcatacgaggtacggaaagctccgctttgttataacggcgatatttttacggtggaggatctgaaaaggatagaaagagaatttccacagattacagcggtgatgatcggaagaggtgttcttcgacatccggggctgaccggacagctgcatggaaaagacttaccggaaaaatcggtatgggaagcatttgccggacagctgagggatgaatatgtaagaatctcgatcaatgaagagaaggcactgtttaaattaaaggaaatctggagttatctgcgctggtcttttccggaaagtaatatctgggaccgacagatgaaagtggcaggagatctggaaacatttctttatggaatgagaaatctcctggacacatacgatccggaaaaaataccggaaaagagaggaattccggggttgcataatagctaggagaaagctaaaataatactgattgaaaataatgagcagcgaaaagagtggggaaaaaacatggaaacagaaccgggacaaaagaaacatctatttactaacaaacaactgtgggcattgctggtgccggtggttgtggaacagattctgaattctttgatgggaacggcagatacgatgatggtcagcaacgtgggatcggcggctatctcggcggtatcgctggtggattcgatcaatgtgctggtgatccaggtgtttgccgcgctggcagcaggaggaaccatcatctgttcccagtacatgggacagaaaaatacaaaaaatgccaccgatgcggcaaaacagctgatttttattatcacggcgattgctgtagtactgactgtagtctgtgtggtatttcagattccactgttgcatctgatcttcggaaaagtggaagcggaagtaatgatcaattccgagatatacttcctgtatacagccctttcgtttccgtttattgcagtttttaatgcgggatcttccgtatttcgggcacaggaaaatacgagactgcctatgaccatctcagtgatctctaatattatgaatattgtgggaaatgcgattctgattttcggtttccatatgggagtggccggtgcggcactgtccacactgatttcaagaattttctgtgcgatcgttgtcatgtattttctgcgtagtccaaaagaagagatatgtgtgcgggattacataaagatccgcccggacaggcataagattaagatgatcctggcgcttggtatcccgacgggtatcgaaaacgggatgtttcagtttggtaagctggcgatccagtctacggtatcgactcttggtactgcggcaatcgcagcacaggcgatgacaaatattctggaaaatctgaacggtattgcagccatcggtatcggcatcgggctgatgaatgtagtaggagagtgtatcggtgccggaagaaaagatgaggcgatatactatacaaaaaagatgtgcctggtatctgaggtagttatcatcatcagctgcctgttggtgttcgcactgacaaaaccaatcattcatctgggaggtatgagcgcagagagtggtgcgatgtgtttctttatggtgacctggatcaccatcatcaaaccaatcgtatgggtaccggcttttattccggcatattccatgcgggcggcaggcgatgtgaaattctccatgatattatcctgtacgaccatgtggctttgcagggtaacattatgtgtggttctttgtcgtgtttttggtttcggaccgattgcggtctggatcggtatgttctctgactggacactccgtggtatcttttataccctgcggtttcatggaagaaaatggctgaatcataaggtgatcgagtaattattcagcatcgccaaaggcatttatatacatttcggctcgtaatggtgagagtattgaaaagttacgtaattggttaaaaatatcagttgagaaagaggagacggattgtgggagaacgattaacgaaacatgatgtggagaaaatagaaaaagagattgaataccggaaactggtagttcgaaaggatgctatcgaagcagtaaaagaggcaagagcccagggcgatctcagcgaaaattttgaatactatgcggcaaaaaaagaaaaaaatcagaatgagagccggatccggtatctggagagaatgttaaagacggcagttgtgatttcagaagagtccaaagaagatgaagtgggactgaacaatacagtgacactgtacatggaagatgacgatgaggaggaaacctatcgtctggtaacttcgatccgcggcaattctctgagcgggctgatcagtaccgaatcaccgatcgggaaagcgattcttggacataaagtgggtgaccgggtagagattaaagtcagtgatgatttttcttattatgtggtgatccggaagattgataagacagaaagcgaagcggacgataagattcggagcttttaaaaggaggaaaaagatgcacttagaggatcgaatcaaaaacgggatgactttttatgaacatggacatacagatccgatcgatatcgaacaggaaaaggaactggaagcgcagagacgtcactgcaaagaagtgatgtttgactataacaacacccgtccgagcgagaatgtgaagaaaaaagaaattctgaaagggattctcgggcattgtacggaccgtgtgtttattgaaagtccggtacatatgtcttacggtaatcatgttcatctgggggatcagttttatgccaatttcaatctggtcatcatagatgatatggatgtgtatattggcaatcaggtcatgatcggtccaaatgtaaccatctgtaccaccggtcatccggtctatccgctgtatcgagagatgggtgcacattattcgctgcctatccacattggcaataaggtctggatcggagcaaattctgttgtgctcccgggggtaacgatcggagagaattcggtgatcggtgcgggaagtattgttacgagagatattcctgccaatgtggttgccgtgggcaacccatgccgtgtgctacgcgagattacagaaacagaccgggaatattatttccgggatatgaaagtagattttccatataccttacgagaagaaggatgagagaaatgatcacgattaaggaaattgcagatcagctgggggtcagtgccacaactgtttccaatgtgttaaatggacgcgccggaaaaatgtcacaggagaccagacaacgtgtcgaagaagcattgctccgtaatcattatgtgaaagaaaagaaaaacaatagtggggaaccgcagcatcatctgatagcggtctatatttgtcttggaaagaaaaaacatgtgctgacggatccgttttgtgggggtctgttggaggggattgaccgggaactgcgaaaataccatcgcgctatggtctgcggaacggtagatgataatgaaagttttgcaaaggtactgaaaaattctaatctggaaggtgctatcctgcttggctgtgaagcagagttttgtactgctctggtacatcagattcccattcccattgtttttgtggattcctatggtgaaggatttgacaatatcggattagaagactatgagggtgggtatgagatgacctcttatctgatcggtcagggacatcgaaagattgccttttttggggatcagcaacatccaatgggaagtaatctgtgtagatttcgcggactgcaggatgcgatggaagaacataagctggagtttgacaaagatgattatttttatcttccccaacatgataattaccgacacgaagtgctgcggcagtttgcacaaaacgtgaaggaaagcgggtacacggcggcgttttttatctcggattttctggcaaatgaagctatcagtatcttttattcgcaaggaatctctgtgccggaagacctgtcggtaaccggtttcgatgataatatttatgcaagactttccaggccgatgcttacgaccgtgcggcagaagccggaagaaaagggaaaagaagcagttgggcttctgatgcggcgcatctatggagaagaggtgccggtgggcaggatgagactgcccacggaattaattgtacgggaaagtgttcgcaatttggctgacagatagcagttgcggacagggtgagaaaaatgaaaaagagtgaatttttacagggaattcgtcacggaattcccatttgtttgggatacttttcagtatcggcggcatttggaattacagcggttcgttccggcctgccgctatggacagctgtgttgatatccctgactaatgtaaccagtgcaggtcagtttgccggggtgaatctgatggtagccggaggttctatgattgagattgccatgaccacgctgatcattaatatccgttatttcctgatgtctctgtctgtttctcagaaagtggaaagcaagatgtccatgaagaagagactggggatcgcttatggaattacagatgagatttttgcagtttccatgcagcagcccagggaattaacagcttcctatatggcaggactgatcctgacgccggttgttggctggacgcttgggacttttgtgggtggtgctgccacccagctgatgccgcagaaattatccagtgccatgggaattgctttgtatggtatgtttattgccattatcattcctccggccagagaacaaaaaaatgtgctgttcacggtgattttggcaatcgcagcaagtgttgccttttccagtcttcctgtgctgaagcatctgtccggtggctgggcgatcattttgatcacgattctggtcagtggaattgcggcatggttatttccgagaaatgaggaggagaatgcagggtgagtacaaagtatattattgtcagtatgtttgtgatggcattgacaacttatgtgatccgtatgcttccaatggcaattttccgaaaaaagatcaatgacaaacgagtacagtcgtttctgtattacgtgccctatgcggtgctttcggcgatgacctttccggcgattttttccagtacgggatctgaggtgagtgcagttgtcggctgtgtggtggcgattgtgctggcgtatatgaaacggggattgcttactgtggctgtcggagccgcggtggcggtttttcttgtacagatgattggattttaaaaacttccgggatggatttcagtgaaaataacggagaaatctatcccggaagttttatatttaaaagatgaaagaatggttttaagagggttccggaagctgggtgccaggttacaaccggatcgtgaaggaacagcaggcgaaccaggtaggtgaacacaaagagggcagctacagatccgagaagaaggtagtgacggctccagttaatccagggatcgagataatatcccagcaggaaaaacggcagcaggaaaaacaacggatggtaggaaaatgcggcggcaaagtccaggcgcagagcggcgagaagcgcgcgggtcattccacagccggggcaggagatgccgaaaaagaagcggaacggacagccggtaaaccaggtcagcagatggtaggaaaggatgaccgcgcataacgtttttgttttggataaaaatattttttttcggttgggatctttgaaaatgatttccagatgcatagataaaatatcctttactgttcagattttgcgactgaaatcagcctgtctgtaattatagatgcaaaataagaaacagacaagagaaaattaagagaagcttcattttctgagggggttgtgccattgtgagagattctcattgatggtataataagtgcatcaaataacagaacatgacagaggagacgaacgtatatgagaataaaaagaagaaatggtctggtcagtgcactgctagggctcgtgacctgcggtctgtatcatatctttttctggtatcagtatggggaagataccaacagggtttgcagagatgaccggaaaatgacgcagaactatatcgtggcatggatcctttcctggatcacctgtggcatctacggactgtactggacgtatcagctggcatcccggctggatcaggcaggtgaccgctacaacgtgcatatcgaatcaccggtgatctttacgatcgtgatgcatattccgtttttatcgtacttttatgcctgtgatgtgatgaacaatttcgcagacgcatatgaaaagaccgcaccacagcagaccgaaagccagcgggattattacgactataccgggaataccacagcccagacaccgccgccggtatggccgacttccggttccaatccgaatggcacatcggtgaatccaaacggttttgatttcaaatccacaatggaagatgtgggaaataatctgaaagataaggcaaaagagctttttggagagaatcatccgtcaaacagcagtcagaatcagcagccggtcagaacggcaggtacctgcccgaactgtggagcagaacttgaacccggagcagagtactgtaaaaaatgcggatatccggtggaaaaataaagagaatatacaatgcaacaaaaatccaggcaacggtgaaagccggctgcctggatttttatgtataagctttatttattcttttccgtcaaagcagtaagtacaaactttgcatggttcgagtccgatggaagccaccatatcgtcgagacgatgataccgcagagaagtaaagttcagctgtttgccgatctcgtcgagcatctcatggtagttatgggaatccgggtttgcgtagtcttccaggactgcttccgtcacggtaccttcccgtttctggatcacacggcgggtgatcagatccatctcggatttggaacgggagaagttcaggtatttgcagccgtataatagtggcggacatgccggacggatatgtacttcttttgctccgctctcgtacaggaactgggttgtctgaccaagctgtgtaccacgcacgatagagtcgtcgatcagcaccatgctcttgtctttgatcagttcacgtaccgggatcagtttcatgtgagcaatctgctctcgctgactctgatgtgtcggcataaaggaacgcggccaggttggggtatatttgataaatgggcgggcaaacggaataccggaacggttggcataaccaatggcatgtgcggtaccggagtccggaacacctgcaacaatatccgcagatacattatcgcgctttgcaagcatatcgccgcagttataacgcatctgttctacgttgattccttcataggaagaggtaggataaccatagtaaacccataagaaggagcagatcttcatttcattttttgccggagaaacagtttccacaccatccggtgtaaagaagacaatctcagacggtcccagttctttgtagtcatggtaaccgagattaaaataagcaaagttctcaaaagaagcgcagatcgcatcctctttctttccgagaatcagtggagtacggcctaatcggtctctggccgcatagataccttcaggagtcataaccagcatggtcatagatccttcaataacatcctgcgcgtagcgaatgccttcgattagagaagatttctgattgatgagagatgccaccatctctgtagcgttaatatctccgccgctcatttcgagaaaatgtgtgcagccgttggcgaaagaacgttttaccagttcgtccatattattaatcttaccaacagttgtgatcgcaaaacttcccagatgagactgaactaaaagcggttgcggttctgtatcagagatacagccgataccgagagtaccctctaattcctgcacgtcccgttcaaattttgtacggaagggagcgttctggatattgtggatcgcccggttgaatccgccttctttgccgtagactgccatgccaccccggcgtgtaccaagatgggaatgatagtcagttccaaaaaataaatcagacacacaattgcttttcgatgcaactccaaaaattccacccatatttgttctcctttgttctatgaatgtttggttggctgtagcttccgaaaacaacagattccggaaaccgcatttcaaatcacgtaccccattatataatggcgattcctgtttcgcaagacaaaattttacacaatttttctccggtgttttgggaaaatactgaaaatggaagaaaaagcggagagatggtcttgtattttttcacgggaaatctataataaaagcgtaactgttcagtaccttcactgttacataacaccggaaaaatacaggtatcggaaccggataaacagtgaaaggaagattatgaagaaaaacagatgggaacagacatacagggaaggaggacctatcatgcgaaatatggagtttaagatggaacgtcagggacttctgacagtgggacaggaagtggatgtgacagaaagtgctctgccaacgtcatattattatacgatacagccaatgattgccatgagtaaaaactatcccggttatgagagactgcagtcacgaaaggggattgtaaaagatattaaagaaacagaccggggatattatacggtggtggaatttgatgaggaggatatcgggaactgataccggtgattcatcaaaagacacagaaaataaaaagaacgtaactgttcagtaccttcacagttacgtgccaaaatgcatttaaaatcaccttcggtgatggcattttggcttgtatgtctcgggattttggcatattcatgccaaaacacctcgcggtacagtggctactgaataattacaaaagaacattccaaataaaacggaatgttctttttttaaaaacctcaagatataattgttgcccgggtgattcagaggatccgggacggattaattattcggacggaaagtgagtgaatcgtcggtcatggactctacgatagccaaagactccaggcgaacacccatctcacggattttcttcccaccttcctggaagcctttttcgataactataccggcaccttccagagtggctccagatttgtttacgacgtcgatcagacccatcagtgcgcagccgtttgccagaaaatcgtcaatcaagagtacatgatcttccggtccaaggaacttcttggaaaggatgacatcatatactttcttgtgtgtaaaggattctactttggaggtaaacatctctccgtccagattcaggctctgtgctttctttgcgaaaacaaccggaacatggaaatactgggctaccagacaggcaataccgataccggaagcttcgatagtaagaatctttgtgatcggtgcatcggcgaaccggcgttggaattcttttcccagttcattgatgaatgcaatgtccatctggtgatttaagaaactgtctacctttaaaacatttcccggtttgacaattccgtcttttaagatacgttcttctaaaagctgcatgtgctttttcctcctgctgtttatcactcatttatttttctttcgtaaatgttcagtaccttcacagttacgagtcaaaatgcatttaaaatcaccttaaatgtattttaatttcttgtatgctatgatacaaccttacggttggaaaggcaacagttttctcactttttcttacggatgtgttgtcctttttacaaaagattgttataataaaaacgatgtgggagggacgatagatgaaacaatatgaagtcatcagagaaattataaaccagtgtccgctgaatcattccagagatcagttttttgaggaaatccagtgtgaagatccggaaagctatatccgggaacgatgcggaggccggaaagaaacttacgaaaaaagcattcagaaagatggcagtatagtatttgacgtctatttttccgggatgcatcagcgatatacattttccgagatctgatctgggaatgtatgaatgggaggaaaaagatgggagagcatgtacatgtactggaagatggaacggttgtcaagcacagtcatacccatacccatgaaaacacaaaagcggtaattaaccggttgtcaagagctatcggtcatctggaatcgatccgtcggatggtggaagaaggcagagactgctcggaagtgctgatccagctttcggcagtgaaatcggcaattaataataccggaaaagtgattttacaggatcacatacagcattgtattgtggatgcagttaaggatggggatatggaagcactggaagaactgaacaaagcaatcgatcgctttatgaaataaaaagagaaaagaggaaagacaatggcaaaagaatgtagcaacacatcctgcagcaaagaaagctgtgaaggatgtccaagcaaacagcccaagagtatgctggaagagatgaacagccagtccaacgtaaaacatgtgattggcatcgtcagcggaaaaggcggcgttggtaaatccttcgttaccgcatctctggcaaatagaatggcacagaaaggttacaaagtaggtatcctggatgcggatatcacaggaccctccatcccgaagatgtatggtgtcaagggcccggcacaggcagtagatgccggtatctatccgatcgaggcaaaaaacggcattaaggtaatgtctgtaaacctgctgcttccgagagaagacgaaccggtcatctggagaggaccgattctggcaaatatggtaaaacagttctggaccgatgtgatatggggagatctggactatctgttcgtagatatgccgccgggaaccggtgatgtaccgctgacagtcttccagtctctgccggtggaaggtatcgtgatcgtatcttctccgcaggatctggtaaagatgattgtacgtaaagcttataagatggcacagatgatgaaaattaatgtgctgggtgttgtggaaaactacagctatctggtatgcccggactgcggaaaacatatttctgtattcggtgagagtcatattgatgagatagtggcagagctgggaacagaagtgctcggcaagatgccgatcaatccactgtatgcggaagcagccgacaagggagctttccatgcggtagaaaatgaatatctggataaagcagtagaaaaaatcgttggataatccttcagaggaacagtgtgaaaatgctgttccttttttatgttgtttttgacgaaatttgaaaaagagaagctgattttcaagagaatattgcccgctctgaattgtaaacgatttcaatccggagagaatgctgtgcaaatagcaaaaaaacaggtgaaaaatgtaaaagaaagcactaaaaatagtgtaacaccaacataaaacagagaagattaaaaagttgacaaatttcgcatcagatgcgataatcaattctcggaatatgtggtactaccagttggagaagggagtaccgatattctacaccggtacacagattttgttaccgcgagtttcagaaaggattgatataatgcaggatatgaaaacaagcaaaatcaaattaaatgaggcgagtgaagtggaagaatttgtgaaggcggctggaaaatgtgactttgatattgacatcttctacaatcgtgtaattattgatgcaaaatccattctcggaatcatgagtatggatctgacacaggaacttaccgttcagtgttatggagaagacaaagaattcgacaaagcaattcaaaaatttgcaattgcataaaggcatctgaaaatgatttgatatgcgaaaaaagaaaaatcttccgtggtgaagccaaatggttcctgcggaagatttttcttttgattgcgttgcatatcaataattgatccggtggatcaattttgatttacggaaatataggcaaaggcaggtggatgagttataataagcaaagtgaaaggtggtgggcggatggaaaaagaagaagtaaagatttcggtcagggagctggtggagtttatcctgcgttccggtgatatagacaacaggagaggcggatgggcagataaagagtcgctggcaaagggaaccagaatccacaaaaagattcagagacagatgggagctgcttatcaggccgaggtgccgctcaactgccgcttctgctatgaagatctagatttgctcgtggaaggccgggcggatggaatagaggaaaaagaagatcatgtgatggtcgatgagatcaaaggtgtacaccgggaactcaggtttgtggaagaaccggttccggtacatcttgcacaggccaggtgttatgcggcgatctatgcagaacagaatcagctggaacagatggaagtacagatgacatactgcaacatggaaacggaagagattcgcagattctcctatatgttcgatgcgcaggaactgaaaacatggtttcagaaacttgccgatacctactatatctgggcccactggcatcaggagtggaaaaaagtgaggaatgcatccatgatcggactggaatttcctttcccttaccgggagggacagcgggaactggtacatggtgtttaccggaccattttgcgggaaaagcagctgtttatccaggcacctaccggtgtgggcaaaacgatgtcatgtctgtatccggctgtgcgctccgttggagaaggaatctcagaaagaattttttatctgactgcaaaaacgattacccgtacggttgcaggggaagcttttgaaatcctgaaaaagcatggacttcgctggaagtctctgcttttgactgcaaaagaaaaattgtgtgtgtgtgacagcatggagtgcaatccggcagcctgtataagggcaaagggacattttgaccgggtaaatgatgcggtgtttgagcttttggagaaagaggaaatttatgaccgggagatgttgctttcttatgcggaaaggtatcaggtctgcccgtatgagatgagtctggatctcgccgtctgggtggatggagtgatctgtgattataattatgtgtttgatccacaggtatatcttcgccgtttttttgcggaaggtgttaaaggagattacgtatttttgatcgatgaggctcacaatctggtggaacggggacgggagatgtacagtgcggttttgtacaaggaggatatcctgagaatgaaaaagctggtgaagccatacaggaaaaagctggaaaaagcactggagcggtgtaaccggctgatgcttgagtggaaacgggaatgtgagacctgccgggttcttccgtccattgggaatttttcgctggcattgctttctgtgatgggtgaaacggaaaattatctggaggaacttggggatggagaacttcgaaaagaacttctggatttttattttgaggtgcggagtttcctgtatatcagtgatctcatcgatgaaaattatgtaatttatacacagcatgatgaggatggaagatttcgtgttaaactgttttgtgtgaatccggcacagaacctgcaaaactgtatggataaagggagaagcactgttttcttttcggctacattacttccggtgatgtattaccgggagcttttaagcggacgaagcgatgattatgcgatctatgcacagacaccctttgctaaagaacagaagtgtctgatcctcggccgggatgtgagcagccggtatacaaggagaggacctgaagagtatgggaagattgcagagtatattcatgcggtagtgtgttctcataccggaaactatatgattttcttcccgtcgtatcgaatgttggatgatattctggaacgctacatggaactgtatgggacggatggggtggagattctgcagcaaagtccgtcgatgcaggagaaagaacgtgaggattttctggaacgatttgagagtgaaaatacagggacgctgcttggattttgcgtgatgggaggaatttttgcggaaggaatcgacctcattggagagcggcttgttggagctgtgatcgtgggaaccgggcttccgcaggtgagttatgagagagagattctgaagcagttttatgacagaaagaaggagaacgggtttgattatgcataccggtttccgggaatgaataaggtgctgcagtctgcaggaagggtgattcgaacgaaagaagaccggggagtgattttacttctggatgagaggttttgtttgccggattatacggggctgtttccacgggaatgggaggagtatgtggtttgtgaccggaggggagttgggaaggtcctggaagagttttgggggagataggggggagaatatggcgaaagggacgccgcgggcaacaaagcctgggcggacaacactttgcgggcggttagagcaagctttaagatccgacgctaacttcggctagctcaaagttgctctgcccacgttgtccgcccaggctttgtcgcccgcggctgtgctttagccaaggggaggtagagtgggttcaggacgagaggtaatggcagggactgcggtggatgaaggggacgaacaggcgtctgcggctgtgttctgattgtggaggacgaggggtaaaagtaaagtttgttgtggagaaagaaaaaagttgggagcatcggttggaaaacggatgctcctttttgagttagagaatgttcaggaattccttcgctgctttggtcagcggcagctgtgggttgtgggcgatgacgagggttcggccggggagctcttcctggatgtccagggggaagagttcaccatcgtcgggtatgcagtagtccgggacaaaggcgatgccgagaccgatgcgggcaagatcgatcaggaggtcgttactgcccagttcgatctccgggaccagatccagctggtgttgctggaagaggtggtgcaggaattcgctggtggtgcttttccggtcgagcatcatgatcgggtagtccaggagatctttcaggtgcagttttttatccatcagttctgtgtagtgggttgagcttgcaatgaagcagtccctgaaggagtggatcgtccggatatgatccccatgacttaaccgggagttcggatagttggtgacaatcaggtctacctgtcccatttccagaagatccacacatttggtggaagtctgattcgttactttgatgtggacattcgggtaggttttatgaaatttattcaggaacggaacaagataataccggcagatggtatcgctggcgccgatacgaagctgacctccccccaggttactggcttccatgatctgcgcttctccgcgtttgatcaggttcattgccggttcgatgtggcgaagcagtgtttctccttcaggcgtcagctgtacccgtttggtgcttcggataaacagagtgattcccagtttcttttccagtactttgacagactggctgacagctgactgggagataaatagttgtttggaagcgtccgaaaagctcagggagattgccacatagtaaaatactttgtacaattcgtagtttatatccatcatttttgataagtcctccttataactgctttcagtataacaaaatcttgtgggtgcatccagtattttcacaaaaataaacaaataataagcaaaacttattaaaaagattaaatatattaattttactaataatgcatcctgtggtatttttatagtgacagtacactggatctctgagagatgcgattcagtggccttaaaaggaaataagaccgaagaaaacgccagatattgattctggtatcgcgaagagcatttctgcagaagttataaacaggagtgcacagaaaggacagggtgaaggatgagcagtgtaagacgtgtttatgtagaaaagaaacctgattttgcggtacaggcaaaagaattaaagcatgagatcagcagctaccttgggattaagactgtgacagcagttcatgtatatattcgttacgatgtggaaaatatttcagaggaagtgtttgagaaagcatgtacatgtgtattctcagagccaccggtagatgtactgtataaagagcagattccgatggcagaaggagcaagagtattttccgtggaatatctgccgggtcagtttgaccagagagcagattcagcagtgcagtgtgtacagttcctgaaagaagatgagcagccgatcattaaatcagcaaccacatatgtgattgaaggaaatatcacggatgaagaattcgaagcaatcaaaaatcactgtatcaacccggtggattcccgtgagacaggaatggtaaaaccggagactctggtaacaaaatttgaagaaccggaagatgttaaaatctttgatggttttatcgatatggaagaagcagctctgaaagaactgtacgcttctttgaatctggctatgacatttaaggatttccagcatatccagaattattttaaaaacgaagagaaaagaaatccatccatgacagagattcgtgtgctggatacgtactggtccgatcactgccgtcatactaccttctccacagaactgaaaaatgtaacattcaaagatggcgattacaaagagccgatcgtgaaaacttatgaacagtatctggcagacagagaagttctctacaaaggaagagatgacaaatttatctgtctgatggacctggcgcttcttgctatgaaaaagctgaaatccgaaggaaaactgcaggatcaggaagaatccgatgagatcaatgcctgctccatcgtggttccggtggatgtagacggaaaagaagaagaatggcttatcaactttaagaatgaaacacataaccatccgaccgagatcgaacctttcggtggtgctgctacctgtctgggcggtgcgatccgtgatccgctgtcaggacgtacttatgtatatcaggcaatgcgtgtgaccggtgctgcagatcctacagtttctgtaaaagagactctgaaaggaaaactgccacagaagaaactggttcgtggtgcagcccatggctacagctcctatggtaaccagatcggtctggctaccggttatgtaaaagaaatctatcatccgaattatgtggcaaaacgtatggagatcggtgctgtcatgggtgcggctccgagacgtgctgtcaagagagagaattctgatccgggcgatatcatcatcctgttaggtggacgtaccggccgtgacggtatcggtggtgcaaccggttcttccaaagtacatacagaagcttctatcgaagtttgtggtgccgaggtacagaaaggtaacgctccgacagaacgtaagatccagcgtatgttccgtagagaagaagtcagcaaactgatcaaaaaatgtaatgactttggtgcaggcggtgtatctgtagcaatcggagaactggcaccgggactgcagatcaatctggataaggtaccgaaaaaatatgccggtctggatggaacagaaattgctatttccgagtcgcaggaacgtatggctgttgttgtagatccgaaagacgttgacgaattcatgaaatatgccaacgaagaaaacctggaagctgttgtagtagctgttgttaccgaagaaccgcgtctggtactgaactggagaggaaaagaagttgttaatatttcccgtgctttcctggataccaacggtgcgcatcaggagacagaagttctggtagatattccgaataaagagggaaatgttctggagcgtgaagaaaaagctcctgcagataccaaagcggcatggttatctatgctggctgatctgaatacctgttctcagaaggggctggtagagatgttcgacggatccattggggccggaagtgtatttatgccatatggtggtaaatatcagctgacagaaactcaggctatggtggctaaggttccggtaatgaacggaaaaacagatactgtgactatgatgagctacggatttgatccatatgtatccagctggagcccatatcacggtgcagtttatgcagttgtagaatctattgcacgtatcgtagcgaacggcggagattactccaagatccgtttcaccttccaggaatacttccgtcgaatgacagaggatccggaacgttggagccagccatttgcagcgttgcttggtgcatatgcggcacagatgggatttggccttccatctatcggtggaaaggacagtatgtccggaaccttcaacgatattgatgttccgccgacactggtttcctttgcggtagatgtggctaagaaacaggatattatcacaccggaactgaaaaaggcaggaagcaaactggtatggatccgtctgccgaaagacagctatgatctgccggattatgcagcaactatggatcagtacggaaaactgcatcaggatatcctggatggcaaagttctttccgcttacgcactggatcgtcatggtatcgctgcagcagtcagcaagatggcattcggtaatcagctgggtgtgaagatggaacacaatctggacgagagagatctgtttgcacctggatttggtgatatcatctgcgaagtaccggctgacaaagtcggagaactgtctgtaacctatactgttatcggtgaagtgacagacaatgcaaaattcacatacaaagatggaatggaaatctccatgaaagaagcgctggatgcatggaccggaactctggagaaagtcttcaagaccaaaggaaccgataacatggagaaagtggaaagcccgctttacaaagcagacagcatccatgtgtgcaaacataaagtagcacgtccgaccgtattcatcccggtattcccgggtaccaactgtgagtacgacagtgcgaaagcatttgaacgtgccggtgcggacgtgatcacaagagtattcaagaatctgacggcggaagatatccgtgattctgtagcaatcttcgaggaagcaatcaatcaggcacagatcatcatgttcccaggcggattttccgccggtgatgaaccggatggttccgcaaaattctttgcaactgctttccagaatgcgaagatcaaagaagccgtaacaaaactgttgaatgagagagacggtctggcacttggtatctgtaacggattccaggctctgatcaaactgggactggttccttatggcgagatcgtaggacagactgcagattcaccgacactgacttacaataccatcggcagacatatttctaagatggtttacaccaaagtagtaactaacaaatccccatggctggcacaggcagaacttggcaaagtatatgtcaacccggcatctcatggagagggccgttttgtggcaaacaaagagtggatcgataaactcttcgcaaacggtcaggtagcaacccagtactgtgatctgaatggaaacgtatccatggatgaagaatggaatgtcaacggttcctacgcagctatcgaaggaatcacaagcccggatggtcgtgtactcggaaagatggctcacagcgaacgccgcggcgatgccgtagccatgaacatctacggagaacaggatatcaagatcttcgaatccggtgttgcttattttaaataagaagaaactcatacaaacattttccgaaaagtaaataaatccagaaagactgctccgaaaagggcagtctttttgtgtcctgtgtttgatgagaaataagagatctggtataatgatataaaactcggaaagtggagaaaacagagaaatggatttaaaagtcagaaaacatatttatttttacggtcgcgttcagggtgtaggtttccggtattatgcggtgcaaaaggccggccagctgggacttgccgggtgggtgagaaaccggtatgacgggagcgtggagatggaagtcgagggagcagagacagacatcgatcagatgatcctctttttacagaatcggacatatatctggatcgaggatatgagagtaaaatccatgtcgttagaaggagagtatggattttatgagagggatgatatatgaatgaagaaagctgtggacacatctgtattttatggtaaaataaaaataactattcagtacacagaatatggaggtagaaacaatgggagtacattcaattgatgcagaagacgatcagtttgcataccgctatgacacacagcttctgatcgacagaagagatgaagatctggacgaggatgccatatccgaatatattacagaacattacgagggcaacagcctgatcgtggctggagatgaagatctggtgaagatccatttccatactaacgaaccatggaaagtgctggcttactgtaacaccatcggtgagatctatgatatcgtcattgaagatatgatccgccaggcgaacggattacagggctaaaactacatacgagagactgctttgtaggaaacgtgtttcacaattgtatatgtaataattgcgaaagcgatgattttgggaacactaataaaaaaatggcaggtatgaagatcacattttctgattatccgagaaatgcagcttccttactggaactgcaggaacaggtaaataaaaaatgaggaatgcctgtaagaagctgacgatgcagaagactttgtaactgagaaagaataaagtccgacaaagtcacggaaagaaaaaacgggaaacaaatggtataatcagaagattattatttgtttcccgtttttttaatcatcaattacgcgttttctttcctaagatacggcacatgcaaataacagtaaaccagctgcgcagtcatgaaacaccagatcagtggttcacagatgatgacgccccagtaacccatcaccgggatgataaacagggcgaagatgatctttccggcacattcgataaagctggaaatcagtggttttgttttttcacccagtgcctgcaaagaatttctcatattgaagaggataccgagcactgcatagaacggagcggtaaaccgcaggtacagggccgagttatccagaatcacatcctgtgtggagccgaacagtgtaaccagatttcgagcgaaggaaaagagaatgattatcgctgtaacaccccagcagacgtccatgatacaggcagtgcgtatacccttgcggatccggtctttgtttccggcaccacggttctgggaaacaaaggtggacatggaagctccgatggtgctgaccggcatcagacagaaggaatttaactttcttgccgttgcatggcaggcgatatacacttcgccaagaccgttgatcgcactctgtaagataacggttccggaggaaaccactgcgttcataaagcccatggaaagtccctgggtggcaagctcgcgataaagctttttgccaaccgcaaaatgctgctgttccggaaccagaatcggtgttttccggatgatatagatcagacagagaataacggaaaatccctgcgcgatgactgtggcaacagcagcaccgcggatacccatctgaaatcgtgtgataaataaaagatccagcaagatgttggtcagggaagaaataatcaggaaaaccagcggcataaagctgtttccgattccccgtaaaagtcctgccagcagattgtaggcaaacatgacaccgataaaagtcgtcagggtagatacataggaatgtgattctgccagaagattttccggtgtcttcaaggcacgcatcagtggataaagtcccagggaagaagcggtcatcaggatggctgtcaggatgagagcaatgatgatggatccggcaacagattttttcagcagagttttatcgccctgtccaaaataacgggagacaacgatgctcagtccgtttccaacaccaaagcagaagccaagcaacagttcgtagattgaggaagaagcgccgatagcggcaagagaactgtcaccaaggaagttaccgacaatcataatatcgatcgtattgtatagctgctgaaaaatgttggaaaacaaaatagggagcgcaaaaatcaccagggattttacaatggggtctttggtcatattaacctgtagattagacatggcagaaattcctttctcaaaaaagatgagctttgaaaaaacaggtcggtcatataagtgcatgctcataacgtataataattatatagtgggagctaaatgatttaccgtatcagttttgatatatgtaaaaaaaagaaacgccactaacgtttctttaaagtagcgagagggggattcgaaccctcgacaccacgggtatgaaccgtgtgctctagccaactgagctatctcgccatatgaaattgtcttccaaagaagaagtggaacctacagggctcgaacctgtgaccctctgcttgtaaggcagatgctctcccagctgagctaagattccagggtcaacactgatatacagttgttgaagtagcgagagggggattcgaaccctcgacaccacgggtatgaaccgtgtgctctagccaactgagctatctcgccatttttcgtggttgccaaccgcaacctgctctacgattatataaaactgttatgaaaaagtcaagcacttttttgaaaaaaattaaaaaatttcgaaaagaggaaaaataacaacgattcgaaagcgtataaggaatggaaaaaacagttcgaataatgaacggtctatagatgaaagtaaggatgcacaaaaatccggttgttgcataaaatagcaggagagaaatttccgggagagaaatatcaatatgggacgggatctgaccaaatgtcatccacatttacagaaactggcggaagaactggtgactgtctgcgaaaaacagggatgtccgatcggaatcggagagtgttttcggacggtacaggaacaaaaccgactgtatgaccagggaaggaccaagccgggtccggtggtgaccaatgcaccggggagtacctatcgctccatgcatcagtggggagtggcttttgatgtctatcgaaaggatggaaaaggagcctataacgagtcgggaaattattttcagagagtcggagctatcggaaaatcgttgggtctggaatggggtggagactggaaatccattgtggataaactacattttcagctgccggactggggaagtacctcggaaagactgcgaaaagagtatggaaatatctatgcttttcaggcaacctggccggaatcggatacatcgaccggaaaaaccacatcttccggaaaggataatccgcatatagaagtgaaggcactgacagcggacagtacacagagagaatggatcctggcattgcaaatagaactgatccggcagggatatcagccgggaaccattgacgggattcccggttcgcggacactgatgggctgtccaacggttcggaaaggtgcgaaaggagaacttacgcggtggattcagaaacggctgtctctctatctgaatgtgtggagcgaaggagggcagacagacggaattttcggagaaaaaacagaacagaatatccgaaattttcagaaaaccaaaggactgccggcagatggcattgtagggaaaaagacctggagtgccctgttgcaaagcaggggaaaataaggtatcatgacagacagagaatacaattcggattaaataataagaagaatgtaagttgagatgacgggaataactgtaaaagtactgaacagatacggaaaaagaaagagaggaaaaaatatggtacgggtaggaatgggatatgatgtacataaactgacggaaggacgggacctgatccttggcggtgtgaagataccgtgggagctgggacttctgggacactcggatgcggatgtggttgttcatgcgatcatggatgcacttcttggtgcagctgcactccgggatatcggaagacatttcccggatacagatccgcagtataaaggaatctcaagcatcctgttattgcagaaagtgggagctttattaaaagaaaagggctatcagattgtaaatattgatgccacgatcattgcacagaaaccgaagttactgcctcacatcgatcagatgatcaaaaatgtggcggatgcactggaactttccgaagaccaggtcaatatcaaagcaaccacagaagagggacttggatttaccggtacactgcagggtatttcatcccaggcgatctgctgcatacaaacggcacaggattgacaaaaaagcaggaatcttatagaataatacagacaaagaggtcacaggtactgtggcctttctttttttatacgggaagttgcaaagaacatttcacttatgaaaaaagagagggctattggttaattgtgctgtttttttggattgcaaggacaattttatgtgaaaactggacgattctatatagcttctgtacgataaagaagatataattttattaaaagaaaggaaaaaaatcacagacaattgtgaaaaagaacgaaggaggaaaaatatgaataagaaaaaagtggtagcgtgtttattggcagcaactatgacagcaggtatgctggcaggctgtggtggaagttcaggaagcagtgattcatcctcttcctcaggtggaaaagacaaactgactttctggttcccgacctttgcatctgctgacggagaagtgacagacgaagaattctggaacgagaaaatggatgctttcgaagaagagaacaactgcgaagtaaacgtagagattattccgtgggataattacgaagaaaaatatctgaccggtgtaaattccaacgacggtccggatgtaggatacctgtacatggaaatgttctatgactatattgatatgggtgccttggcagacatcgatgaatactttacagatgatgaaaaagcaaattacctgtactacgatctgggaaatatccagggtggacagtatgcactgcctgtagttgttggtaatccgagacttctggcagcaaacatggatatcctcaaagaagcgggtgtggatgctgttccgaccaactgggatgaactgaaagcggcatgcgaagcagtaaaagcaagtaatccggatgttgcaccgctgagtgcaacctggggaagtacccattatggagcactgaacgaagcatactggccatatttctggggagctggtgcacagattgtcgatgaagacggtaatctgaccatcgactctgaggccggtctgaaagcaacacagttccttgcagatatgaaagaagaaggcctgattccagaaacaagtacttctacagatgactctctggaaccattcaagaatggtgaagctgctatgacagtcgcagcatccagcaacctggcaaaaatagatggaatcaactgggattactctattctgtccggtccggaaaatacaaagacatttgtagcatcagacagtctggtactgtttaacaaatgcaaaaacaaagatcttgccatcaaacttatgaaatatgtgaccagcaaagatgtaatggcagatttccatgaaagagtatctgagcagccgccgatcactgcagacgatacctacagcggagatgaaaaatttgccgatctgttcacaaatcagacagacaagttccagtcactgccggtattcaaaggcgcaagttccatgtatgataccctgtataagaatatgcagtctatgatgcttggtgaactgactccggaagaagttctgaaaaacacaacagaatactatgactccaatctgaaataatcagatggaaatttagttagagaaggttggtaataagaggggatggtgcataggagtaaccggtgtaccgtccctctcgtttcacaatggggcaaacaagataaaaaggagaatgacatgtcaagaaaaacaaaagaagcagtacagggagttatttatattctcccgagttttgtattgattttgattttttgtattattccgattttcatgtccggctatttcagctttacagaatataatattatgaattcgccgaaatttgtaggacttgataattatatcaaaatgtttaaagacagttatgtgacagatgcagcaaaaaatactctgctgtatgtggttatgactgttccggcacagacgattctggcactggcatttgcagcttttctggcagcaaagatacagaataaaaaaggtgaattcttacgaagtgttatgtttattccggttatcgcatctgcagttaccgcaggtacggtatggagaatcatcctgaatacagatggtggttttctgaataacattctgaatttcttccatatttcttctgttaactggctgggtagtactaaaacttctctgttaagtatctgtattgttgcagtatggaaaaacgtaggatatttcctggttatctattatgcaggtatcatgggaatccagaaagatctgtatgaggcggcaagagtggatggagcaacaccgctgcagcagtttactaagattacgctcccggtattaaaaccgatcacgtatctggtagttacccttggtattatctggtccttccaggtattcgacctggcttacctgatgacgggtggcggacctggtcattccagtgttactctggttatgggcatctataatgcagcatttaaacagtacaaaatgggatatgcatgtgcaatggccatgttcctgttgcttatgattatcatcatcaatgtagtggaagatctgttctttaaagagaaaaaggaggcgaaatagacatgaagaaaaaacagaaatggaccgtcttttccgtccttggcttattgatcttgctgctttttgcagctatctgtattgcgccttttatctacatgacaatcatgtcgttcacccagtctaccacactgatgttacactggagtgatattaactttggagattttacaaactttaactacgtgctgaaaaagacaggatttatcagggcactgacaaacagtgtgatcgttgtattctgttcctgtctgttcaactgtattattgcgtccatggcagcctatggatttgcaaagaaaaaattcccgggcagcaaggcgattttccgtatttatcttctgacactgatgattccgggacaggtaacgatgattccggtgtttatcatgatgaacaaagcgggactgaccaatacatattttgctctgattgttgtcattttgaatgcattcggtgtattcctgatccgtcagtttatggatacggtaccggatgaactgctggaagctgcgaaagtagacggatgcccggagtaccggatcttcattcagatcgttattccgctgatcaaacccgtactgatttcactggttgtatttacctttgtgacttcctggaatgatttcctgtggccgttggtatccacatccaattccgatatgtataccctgacggtagcattgtctctgttaaaaacacagtatcagacaaactatggtctgatcatggcaggtgcaacggtatctttcctgttcccgttcatcatgtatgtgttcttacagaaacagttcgtggaaggtattgcactgagtggtattaaaggttaaaaaattaaaaatgtataagggggtagctatggaactgttaaaagttaaaaaaatcacttcgctggaaaaagtgttcccggatcaggagccgagtggagagggaatggaagatgtgatcaccgcactgaaaaaagagacggtatctttccagatggcttattactggggtggtgagagaaaaggaagagcacaggtgcaggtgacggccgatgacaaagagcaggtacgtgtgagaagtgtccgcctggttccctgtgaatatccggcacatatggtggcagatgaggattatctgaccaccaaaccgggtctgtatcctgatctgctgagtgagatccagccgtggggtgtggaactgatcagcggacagtggaagagtctttggatcgatgtggacaccacaggactcgctgccggagaccataccataaaagtggatatggtagtggaaggagaagtcctgggcagttcgatagagttgattcatgtagtagatgcagaacttccggagctggcagtaccacacacagagtggtttcattcggattgtctggcaaattattacggcgtggaagtgttcagtgaggaatactggaagattgtggaaaattttgtacgcacagccgtaaaaagaaaatgtaacatgttgctgacgccggtatttacccctcctctggatacagcaatcggtggagagagacgtaccgtacagctggtagatgtacatgtgacagagaacggatataccttcggtttcgataagttcgagcgatgggtagatatgtgtaaacgctgtggtatcaaatattatgagatttctcatctgttcagccagtggggagcaacgatggctccgaaggttatgggtgagaaagatggagaactggtgcagctgtttggatgggacacagaagcagcaggaaaagaatacagtgagttcctgcatcagttcctggcagcactgaaaccggaactggagaaactggaaatctctgaggtggcatatttccatatttctgacgagccttcccgggagcagtttgattcttataaagcagccaaagaagttgtggaaaaagatctggaaggttatcagatgatggatgcgctgtccgattacgaattctatgaaaaaggtctggtatctcagccggtatgcgcagtcaaccatattcagccattcctggagaaacgtccggaaaagctgtggggatattattgcaccggacagtacgtggatgtaacaaaccgtttcatcgtacagccgggttaccgtaccagaatcctgggtacgcagatgtacaaataccagctggatggattcctgcactggggctacaacttctacaatgcagaacattccatcttcccgatcgacccatatcgctgtacggatgcagcaggggcatttccgtcaggagatccttttttggtatatccgggagctgacaaagagccggaagaatctctgcgtatcatgctgatggatgaggcaatgagcgatctttgtgccatgaattatctggaagaacttgcaggaagagatgtggttatgaagtgtatcgaaccggaaggtggagagaaggtagagtttgagtcttatccgagaagtattgcttatctggtggagatgaggaagaaagtgaatcgggagattgagaagagagtgaaataagttgtaacaagacggacgcagcaagcagtcacctgccgctgttttgttgcaactgggagaaaagagtgtgtgaaaaagggaaggcattcggttttggctgaatgtcttcccttttgttttttattgatttatgttatttgttacctgcacgaattattgatgataaaagccgcgtcgtgtaggttggtgctttagagcgtgtctgaaaaatcatttccgcaaactgggattcgcagctcacgaaaagcctttttcagacacgctctagttgctattctgtgccggaaaaattctttacggatgatgcatactcggatggagtcatccgggtgaattttttgaattgcagagaaaaatactggtaggaggaatagcccagcatatcggaaatctgtgtgtagttatatcgtttctggcggatcattttctgggcggtttcgattttcagacggcagaagtagtcgataacgccgcagcctgttttttcatgaaacattttctgcaattgtgaacgccctacagaattttccttgcagatctgcacaactgtcagatgctcagaaagatttcgctgcaggtactgtacgatttcctggaaaacctcatcggtatctctgcggatcatcgggtgatcgctgaatggctggctggcaaccggatcgatagcaggcggtgtgctgtagcggcgctgcagactgatcagcagtagttcaagtgacaaaaaaataatctgttcactgccgaaatcatgaacggaattacgttccagcaggcagatgttaggattgtttaatggtgtataaaaagtttttctggtttcagagataatctgccccagataaaaccgttcgttctgattcagagatacccggcaattttcaaagaacttcatgcagggatttgtgcattcaaaagaaactacgacgagattcggagaagtttctccgtctccccgtaatgcatggaattcgtttggtttatgaaaaatcatttcattagaagcaagaaggacttctttatcacccgcggtcacgaaaagattaccgctgtcgacgaagacaaattcccaaaaatcgtgagattccccgtcaaatacatagtctttcatatattcaaaatagtgaatggaatagatcttgcgaatatgaagatcttccctcagagtaatactttcgtaatttggcattcttgtcacctcagaagttatgaatactaacaatacttgtaactgatcgatatctttataattacaagacaaaacaatttccattattatagcataaataaaacaaaagacaaaagaaattagaatcaaaatccaggcggtaggagttgacaaaactacttttttttcataaactataaggcagaaagcatgagaaaagcgaagaacggaaagagtatctgaaagaggaaccacagagagggacagtcactggctggaagcagtcccggggaatcgtcggtgaagtgcatccgggagctgatacggtgaaagagagtagccggatccgcaggcaggcgttaagggcagaaagtggaagacggatccggaagatacgtcttcaaaaagagtggaaccacggatgacttcgtctcttattgagacagtcatccttttttctgtttacagaaaataaaatggaggggaactatgagttttatcagtcatatcaaagaagagttccaggtgattcaggaacgagacccggcaatcaagacacctttggaagtgctgttatatccgagctttcgggtaatgatcaaatacagacgggcacacaaattatatctgaaaggccattactttctggcacggtggatctctcagcgtgcggccagaaagaccgggattgagattcatccgggtgctacgattggaaaagggctgttcattgaccatggaagcggtgtgatcattggagaaactacgatcattggcgataatgtaaccttatatcagggtgttaccctgggggggaacggaaaagaaaccggcaagcggcacccgactctggaagacaacgttatggtgagcgcaggagcaaaaatcatcggttctttcactgtcggagccaactccaagatcggagccggatctgttgtgatcgaggaggtgccaccgaactgtaccgtagtaggtattccgggacgtgtggttcgtcagaaaaatatgaaagtaccgagaaccagtatggatcactgtcatctgccggatccggtgctggatgatctgaaaacgttgcagaaggaatacacggaagtgaccaaccgattgctggaagtggaaaaagaacttcgttttatcaaaaataaaaaaggagaataacaagatgaaactgtataatacactgacaaagaaaaaagaagaattcgtaccattacaggaaggtaaagttaccatgtatgtctgtggacctacggtatataactttatccatatcggtaacgcccgtccgatgattgttttcgacaccgtgcgccgttatatggaatataagggatatgaagtgaatttcgtatctaattttactgatgtagacgataaaatcatcaaaaaatccatcgaagaaggtgtgagtgcagaagaagtttcagaacgttatatcaaagaatgtaaaaaagatatggcggatatgaatgtaaaaccggccactacccacccgcaggcaacgcaggagatcgatggtatgattgccatgatcgaaacactgatggaaaaaggatatgcgtatgatgtaaacggaacggtatacttccgtaccagaaagtttgaagaatatggaaaattatcccacaaaaatctggatgatctgagatccggtaatcgttctcttctggtgtccggcgaagatcagaaagaagatccgctggatttcgtcctgtggaaaccgaaaaaagaaggagaacctttctgggtatctccatggggtgaaggacgtccgggatggcacatcgagtgttctgtgatggcaaaaaaatatctgggtgaggaaatcgatattcatgccggtggggaggatctgattttcccgcaccatgaaaatgagatcgcgcagagtgagtgctgtaacggaaagacttttgctcattactggctgcataatggtttcctgaatattgataaccgcaaaatgtccaaatccctgggtaacttctttaccgtaagagaaatcggtgaacagtatgatctccaggtgctgcgattcttcatgttaagcgcacattacagaagcccgatcaacttcagcagagagatcatggaagcttctaagaatgctctggaacgtattgtgactgcggtttccaatctgacacatcttgcacaggaagcagcagtggatgttctgtcagatgcagaggaaaaactgcttgcagagatccctgtgtaccgcaaaaaatttgaagacgccatggatgatgatctgaataccgcagatgcaatctctgcaatctttgaactggttaaatttgccaataccaatgcaaatgatgcttcttccggagcatttgtcacagcactgaaaaaggagattgttgcattaagtgatgtactgggtcttcaggtagaaaagaaagaagaaaatctggacgctgagatcgaaaaaatgatcgaagaacgtcaggcagcaagaaaagccagagacttcaaacgtgccgatgagatccgtgatgaactgctggcacagggaattattctggaagataccagagagggcgtaaaatggaaacgagcataacatatctgaaagaacagtttcagctgaaggatccggatatccgttcttactctccgctgacacttgcctatatcggagacgggatctatgagttatatatccgcaccatcctgatcaaacagggcaactgccaggtgaataagctgcataaacaggcaagccggttggtaaaagctcaggcacagtcagagatggtgcaggcactggagccacattttacccaggaagaagaagcagtctacaagagaggtcgaaatgcaaagtcctacactacagcgaagaatgccactacaggggattatcgccgtgcgacgggatttgaggcggttatggggtatctgtatctgacggatcagtactgcagaatgattgatctgatcaaaatgggattggaggcactgaaagatggaaaataaaatcgaaggaagaaacgcggttttagaggcattacgcgcgggaaaaccgattgacaaattatatgttctggatggatgtccggacggaccggtgagaaccattatccgggaagcaaaaaaaggcgatacgatcatcaattatgtaaaaaaagaacgcctggatcagttatctgaaacgggtcatcaccagggtgttattgcgatggcggcttcgtacgagtatgctacagtggaagatattctggaaaaagccagggaaaaaggggaagctccctttattttcgtactggataatatcgaagatccgcataatctgggagctatgatccgaacagcgaatctggcaggcgcacacggtgtaatcattccaaaacgaagagcagtggggcttaccccgactgttgcccgtacttcagcaggggcaatcaattatacaccggttgcaaaagtaaccaatttaaaacagaccatggaacaactgaaaaaagaaggcatgtggtttgtatgtgcagatatggatggtacgccgtattatcagatggatctgaaaggaccgatgggtctggtaatcggaaacgaaggagaaggagtcagcagattaatcaaagaaacctgtgattttgtagcctcgattccgatgaaaggagatattgattccctgaatgcttctgtggcagcaggggttctggcttttgaaatcgcccgtcagcgtggataacagtgaggaaaacaggatgaagaaatatacagagtacacagacgaggaactggtggaactgcttcggcagggggatacagaggttatggattatctgctggaaaaatacaagtttgttgtacgccagaaagcccgtgttctctatcttgcaggcggagaagcggatgatctgattcaggaaggaatgatcggactcttcaaagcgatccgggattatcgcggggataaagaggcttctttttatacgtttgcccaactgtgtgtggaccggcagatgtataatgccatccagtcatccaccaggcagaaacatcagccactgaattcctatatttctatgaatggagaagaatgggaaacacagatgggcagtaaaacagaacagagtcctgagacaatcattattgcacaggaaaatgccgtgcagatggaagaaaaaatcagaaaacagctaagtacttttgaaaatgaagtcctgacactttatctggatggaaataattatcagcagattggtgaaaagatgaacaaatcatccaagtccattgacaatgctctgcaacgaatcaagggtaaggtccgggagagtcttggcaggaaaaaataaaatatttaaaaaaatctgaaaaatatgaaaattatgcttgactttttccggagcttttgctaaactatttaactgtagcggacagataaaaacgctgcagatgctgatgtggctcagaggtagagcacttccttggtaaggaaggggtcacgggttcaattcccgtcatcagcttacaaagctccttgaagtgattcagggagcttttttgacttacaggaattgttttctgtaaagcaaaaatgtttttatgaagatccggtaaaggatataacggggaaagaaaggagaagatattttatggtaagaaaaacaaaggtagcagtcgtagaacatccgcgtggaggagaaggcagtgtggaatttcaccacattgtatctgaagaagaactgaacggacacggttccatgtatgccatggcagtacttcgtccgcacagcagcgttggctggcatcagcatgtggggaatacagaaccttatttcattttaaaggggaaaggggtatttgtggataatgatggtacaagaacagaggtagggcctggagatgtatgtgtgattgaagtgggacagagccattctctggagaatccaaatgacgaagaactggtatttatggcgttagtttacaatgcataaacagacatatcggtacgaggcaatcaaatatccgtctaacgaagatgtgtttttcaatgtcctgtggcacaacagggattacactgcacctcactggcataacgggcttgagattctgtatctgctggagggaagtgaagactgttatctgggagaggaagaatgcatccggatgaaaaaaggagattttctggtaattaattcccgggtggtacacagtgttcagtgtccacgacagtgtaaggagatgctgatacagatcccttatccgatgatgaaacggtttattcctcagatcgacgggctggaatttgtctgtgaaaagatcaccggaagaaagcaccggatggatacgtttatggtggagagagcactgagtgctcttgcagaactgcatccttttcggtcgccggaagaaactctggagttctacagccggatgtatcatctgctggctgtactggtaaaagacttcagcgtatcggttacttctgataagatggaaatatcagaaaaatatatggaacgactgggaatgatcacttcatatgtgaaggaacattatacggaagaaatttcgctgcaggagattgcgcggctggtttctctgaatccggattatttcacgcgattttttaagaaatatatgggcatgacatttctggattatgtgaattcggtgagaatggaacatgttgtcagagatttgcagagaacagatctgagtgtccagaagctgctggagattcatggtttcactaattataaattatttatgaaaatgtacaaatccaggtttgagagtacaccgggaaagatgcgaagataccggaaagaacagaagatagaagattaacagacgaaagagatctgccggcaaagaaccggaagatctcttttaaagttgcgttgcatatcaataattgatccggtggatcaattttgatttcctccgggaagataggacggttgtagttgtatggggatgtggttactgtggggaaactttgctctgatcgactttacgttgtgggtaagttcgattataatggaaaaaggtaactgttcagtaacttcacagttacggaaaaagatcaaagggaaatatgcggggaaagaaaaggggagaaagaaattatgagtgaaataacagaacaaaatcaggatcggctgatcatcgtgattccggcatataacgaggaagaaaatatagaaaatgtagtagcacagtggcatcccatcgtggaaaaaacaggagaggacagtcgattgtttgttatcaatgacggaagtacagatcggacgcaggaggaactggatcatctgcagggaaaatatccgcagcttcgcacggtaaaaaaagaaaaccagggacacggtgccactattttatatggctaccgctgtgcgattgcggaaggggcagattatatttttcagacggattctgatggacagactctgccggaagaattctggaagctgtgggcagacaggaaaaagtgtgggcttttgattggaagcagaaaaagaagacaggacggctggcagcggatctttgtgacacgggttcttcgactggtgatccttgcgacatttcactgctgggtggaagatgccaatacaccgttccggctgatgcgggctgcagaactggaagaagttttaacagagattccaccacagtattttctggcaaatgtactgatgacggtgcgatatacaaaagaaggacggcgggtaatgtattatccaattacattccgtccgcgacagggtggagtcaattccatcaatatgaaaaaaattgtaaaaatcggtaaaacaacactaaaagacttccggaagtggggaggtgcgaaacagtgaatgagaaaagaaagggaatatggaaagctgttgtactgacggtgctttttatgagtgcacaggtcctgttaaaagaggacggaaaagtatttgctgtctggtggctgaccatactggtgcttggatggtgcagttttccgctttgccagtatcttttttccggattccgtgacagaggatatctggtggcaaagatattcggtattgccggtgcgggatttttgatgtggctgggagcaagtacgggaactgtgccgtttacgcatgtgagctgtcttgtaagcacaggtgtgctggcagctgtctgctggggtgtctggattgcgctaaagaaacagaagataaaagacaaaatgtcctggaaatttacaactgaatggttccagacagtgctggatgatgaactggtatttatcttgttctttcttctatggacttatgtggcaggatttcgtccggcagcgtacggaacagaaaagttcatggactatgggttcatgatggcgatgatgcgcagtaccacacttccggcgaaggatctgtggtatgcgggagcaaaaatcaactattattatggcggacagtattttgcagtatttttaacgaaactgaccaatacgcaggtggcacagacctacaacctgatgcggacactggtggcagggttttgtttttccgttccgtttgctctggtacgccagatggtacttgacagctggaaaagagaaaaaccggcactgcttggcggtgcccttgcgggggcaggggtatctcttgccggaaatatgcattatgtggtgatcggaaaacttcttccgtggatccgggagatctttcatctgccaaaaggggattatacttactggtttccgaattccacccgctatatcggctattatccggcgggaaatgataaaacgattcatgaattcccttcctactcctttgttttgggtgacttacatgcccatgtggtcaatctgatgtttgtggtggcactgatcagtctggtttatgcgatgatgcaacattacagcggaaaaaatgcgctgcaggcggaggtgacaggaaacaggaatttttataaaaaccaggtagtggcagctctgacagatccctatgtgctggtgtttgcttttctgatcggtatgtttcactggacgaattactgggattttgtcatctactatgtgatgggtggcatgggagtgatctggtgcaactgccagaactataaagaactggaaaaaccgcatcgtatgagaatgacgatggggatcagcctgcttcatgcggtatgggtattcttactggcaaacatagctgcactgccgtttactttgcagtttcagagcatggtcagtgaagtggcacttgcacagaaccattccagaccatatcagtactggctgatctggggacttccggtcatcgggacagtgctttttttctggtgcgtgaaacgggaaggtgcgaaaaaagcggatgatttcggtgtgctgctggggatctcggctctggggctgatcgtgatcccggagatcgtttatgtgagagatatctatgaaaaagaatacgccagatccaatacaatgttcaaattaacctatcaggcatttacgatgtttggaatcttatttgggtatgcactgatccgtctgtggatggagaagaggcatgtgatacgaaaaattcttaccagcgtggtgtttgcctgttttgtgggctgttgtttttatacggtaactgctgtgcatgcatggtttggtcagatatgggatccggcgcagtatcagggactggatgctaccgcatatcttgagacaacctttccggaagatgctgcggcgatccgctggctcaatgaacatgttaccggcgatccggtggttctcgaggcaaatggagacagctacagtgactatgaacgggtgtccgcgatgacgggacttcccacagtgctgggctggtatgtccatgaatggctgtggcgaggcgataccggggcactgaatgagcgtgcacaggaggtagaggctatctatacctcgacgaaccaggaagatgtaaaaaaactgctggaaaaatatcaggtcaggtatatttttgtgggcgcgagagaacgggaaaaatatgcggcactgaacgaatccatgctgcagtcgctgggaaatattgtattttccgacgaacaaagccagacttatgtgctgcaggttgcattttcggggcagtaggctataataaaaaagatacaaaatacgcggtacacccgacagggaggaccagcggatgagaagaaaggacggacaacctatgttgaaaggaaaaacagtggttctggcggtaagcggaagtattgcagcatataagatcgcttctctggcgagtgcccttggcaaacttcacgctgatgtgcaggtgctgatgacacaaaatgccacgaattttatcaatcccatcaccttcgagaccttaacaggaaataagtgtctggtggatacgttcgaccggaattttcagtattcggtagaacatgtggcactggcaaagcgggcggacgtggttctggtagcaccggcttctgccaatgtgatcggaaaaattgccaatggaattgcagatgacatgctgacaacaacggtgatggcatgtaaatgcaaaaaaatcatttctcctgcgatgaatacacagatgtttgaaaatccaatcgtgcaggataatctgaaaaagctggaacactatggatatgaagtgattcagccggcagtcggacttctggcatgtaaagacgtgggcaaaggaaagatgcctgagcctgagactctgctcgaatatattttacaggaagtggcttatgaaaaagatctgaaaggcaaaaaaatccttgtgacagcaggaccgacccaggaaccgatcgatccggtgcggtatctgacaaatcactccagcgggaaaatggggtatgcgattgcaaaagtctgtagcatgcgaggtgcggaggtgacactggtcagtggaaaaactgccataaaaccaccactctttgtggatgtggtgccggttacaacagcgagagagatgtatgaggcggtgaccggcagatctgaccggcaggatatcgtgatcaaggcggcggctgtggcagattaccgtccgaaaacgatcagtgagcagaaagtgaagaaaacggacggagaactctctattgagatggaacggacggatgatattctgaaatatctgggtgaacataagagagcgaatcagtttctgtgcggattttccatggagacggaacatatgctggaaaattccagaaagaaattgaagaaaaagaatctggatatgatcgtggcaaataatgtgaaagtggaaggtgccggatttgccggagataccaatattgtaacactgatcaccggagacgatgaaacacagcttccgttgttaagcaaggaagaaacggcagtggagattatgaataagattctggaacagacagagaaacagttataagggagagaattatgatattagctattgatatcggaaataccaacatcgtagtgggatgtatcgatgaacagaaaacctattttatcgagcgggtttccacagacagaagtaagacagaactggaatatgccattgtgatcaaaaatgtactggatattttcaagatgtctccgaaagaacttgagggtggtatcgtgtgttctgttgtaccacagattacacagatcgtaaaactggcagctgaaaaaatactgaaaaaagaagtcatggtgcttggccctggaattaaaaccggcatgaatattctgatggacaacccggcacaggtgggaagtgatctgattgcagatgcggtgggagccatcagagaatacaaaccaccgatgattatctttgatatgggaactgcgacgacggtttgtgtagtcgacagaaagaaaaactatatcggcggcatgattcttcccggtgtgcggacttctctggatgcactgacggcgagagctgcgcagctttccggcatcgatctggaagcaccgaaacgggtgatcgggaaaaataccattgaatgtatgaagagcggcatcgtctacagcaatgcggcactgatcgatggtgtgatccttcggatggaagaagaactgggtgaaaaagcaactgtgattgctaccggaggtctggcaaagagtattgttccatattgcaaagaagacgtgatcttggatgatgatctgctgttaaagggacttctttgggtgtataagaaaaacagctgaaattatataattcagtgcgggatattatcagtgaacagtaaaataattcaataaaaggatagaaagaaaaaggggaaatggttgcatttcccctttttatcgtctacaataaaaccataaaaccctaaggaaaagaggaattattatatgaaactgaaaaaagataccatttgtgtccagggaggatggcagcccaagaacggagaaccgagagtactgccgatttatcagagcactacgttccgctatgagacaagcgaagagatgggaaaactgtttgatctggagaaagaaggttacttttattcccgtttgcagaatccaacctgcgatattgtagcacagaaaatctgtgatcttgaggggggcgtggcagctatgcttacttcttccggtcaggcagctacgatgcttgcggtgactaatatctgtgaggcaggagatcatatcatctgtgcggcaaaaatctatggcggaacttctaatctgttagccgttaccctgcatcgtttcggagtggaagtagatctggtggatcaggatctgccggaagaagaactggaaaaatattttaaaccgaatacaaaagcagtatttgccgagacaatttccaacccggcaggtgttgtacttgatattgcaaaattcgtgaatctggcacacagccatggagtaccgatgatctgtgataatacctttgcaacaccgatcaactgccagccatttcaatttggtgtggatatcgtcacgcattccacgacaaaatatatggatggacatgccatggcactgggtggctgtatcgtggacagtggaaactttgactgggaagctcacaaagaaaaatttccgggtctgaccacaccggatgaatcgtatcatggtgttatttacacacagaaattcgggaaaaaagcctatattcagaaagcggtagcacagctgatgcgagatatgggttcctgccagtctccgatgaatgcatttctgaccaatgtaggcctggaaacattgcacctgagagtaccgcgacactgtgagaatgcattaaagatcgcgaaatttctggaaaatcatgaaaaagtggcatgggtggaatatgcaggactggaaagcagcaaataccatcagctggcagaaaaatatatgccaaatggtgtctgtggtgtactttgtttcggtcctaaaggagggaaagaaggtgcaatgcgattcaccaatgcactgaaactgatcgcaattgtaactcatgtggcagatgcccgtacctgcgttctgcatccggcaagccatacccacagacagctgaacgaagaacagctgattgaggcaggtgtccttccggatctgatccgtctctcagttggtattgaagatgtggatgatttgattgcagaccttgcgcaggcactcgaagcggtgtaaaatagaatcaggatactccggtatagggaagatgaccggggacagaaaaggagaaaggcatcatgagtaaagcacaggagcttattaaaaaagaaggactgttgggaatgatcgtcaccgatccctataacatgagacacatcagtggtttccgcggaggagagggcgcactgtacatatctgccacccagcaggtgctgattacagattcccgttatacggaacaggcagaaaaagaaagtgattttaccattgttcaggaacatcgcggacataccagagagcagatttttgcagaatgtctggaaaaagaagaaggcacactggcaatcggatacgaagatcagtcgctgctttgcaaccagttcgacaagatgaaaaaagcacttccggttaaagagtgggtgccgatggggggaaaagtggatgcccttcgcagaatcaaaactgcagaagaaatcgaatatctggcacaggcagagcatatcggtgatgttgcattttccaggatcctggattttctgaaaccgggagtcagtgaactggaagtggcagcagaactggaatatcagatgaaaaaagcaggagcagaagatctcggatttaataccattattgcttccggactgaactcctctatgccacatgcgattccgggcagaaagaaactggaagccggagactttgtaacgatggatttcgggtgtaagtatgagggatactgctctgatatgacaagaactgtagtaatcggaaaagccaatgataaacagaaagagatctacaacgtggttctggaggcacaactggctggccttgctgctgtaaaagccggaaaaacaggtaaggaagtggataaggccgccagagatatcattacaaaagctggttacggtgactgttttggtcacagtcttggtcacagtgtgggtctgtttattcatgagaaaccaggacttgctccgtctgatgaaaccgtgctgcaggcaggtatgatcgaaactgtggaaccgggtatctatgtaccgggattcggcggcgttcgtattgaagatatggtactggttaccgaaacaggttgcagaaacctgacgggttctccgaaggaactgattgaactgtaaagcccagcctggtcacaggaaagcagaggatcagtagtcagataataagaatatatgcataaataaaaaggaagagatatctgtgaaaacagatacctcttctcttttttatgcgagcaacgaaccaaagtcctgcttgcacgagaccttggcgattgccgcgaaaacgtttaaataattatgcagctgtgcggaaaatagcaactctgtgtttatcaagaattgtatacacaatcatgcccaggattccacaggaaatcacttctccgataccgaccgtacccatcaggaacggaatcggaagcggtacctgatagccgtagtgcagaacaaagggaacgatcagaatattggaaatgatcggtggcagtggagccagaaatttgttccggttgcgaagcagataggtgaagcaggcgcccagtaaggtggcgatactgccgaagataatatccggaaggatacatccgccaagaatattactgatcaggcatcccacgaacagaccggggatagctgcaggcgtaaataccggaaggatggtcagtgcctctgagacacgcacctgtacctccccataggaaaacggtgccagaatcacggtcagaaccacatagattgctgcgatcatcgcagattgtgcgaggaacaatgtgttactttgttttttcatattcagtttctcctttagttttgttttacgagtggaaggtcacgaacactcgattcattttcacgcggcttttgagtcagacagacatgggtacatggatatctggcgaatgccgtggaggcatatactgaaagtatatgacctacgccggaaatcggcggtcagccctgtaagaccttgtttttatgggctttgcgacaggtcagaatatagcatatcagctgacaaaaagcaagaggattttataaaaaaataaaattgagaaatacaacttgtaaagttgtgcatacaagttataagatagaggaaagaatacaggcaggaggtgtgtgttacggagaaagggaaaaaatatatatccctgatggaagaattgaaaagtaagattctttccggtgagatccgacccggcgcgaagctgccatcggaaaatgaactggcgcaggaatatgagatcagccgccatacagtgcgaaaagcactggcgattctggtaacagacggatatattacaacaaaacatggcaaaggaactttctgttccgacaggatggcgcaccggaagaattcgaaaaatattgcagtggttacgacttatatttccgattacatttttccacgtctgatccaggggatggatcgggtactgacagaacaggggtacagtatcatgctgaaaaataccggaaacagccggcagaaagaagcacagtgcctcgaagacattctgactaaggatgtggacggactgattatcgaaccgagcaaaagccagattttgtgcagaaatatgcctctgtatgagcagcttgaccgtatgggcatcccgtatgtctttatccagggaagctacctgcagatgaaaaataaaccgacgattcttctggatgatgcgaaaggtgcgtacctgctgacaaaatatctgatcgatacaggacatcgacagattgctggtgttttcaaagcagatgacagccagggggcagaacgtcacaaaggatatgtcaaagcactgcaggaagcaggaatgtcttatcagccggaactggtggtgtggtttcataccgaagaccgaaaggtaaaacctgcggtgatggtacagatgatgctggaggcggaacttccgattgatgcagtggtctgctacaacgaccagatcgcggtggaagtgatccggatgctggaacggatcgggaaaaaagtaccggaggatctgtccgtgacaggctacgatgattcgatgatcgcaagaaccggtccggtggaattgacgacggtgtctcatccacaggaaaaacttggtgagatggcagcagaacttctgctggaactgcttcatgggataccacccgaagaatccagagtacttcgcctgattgaaccggagctggtgatccgaaagtcttgtatggaacgccggtgagaggagaataatagaaaacgctggcagcaggcatccggagtttttcggaaaaaggaaatagaaaacatcagtaacagataaaaatcgaacaaaaaacctgtttgataaaaaaataaaaacgagcaaaataaggaggaatttttcacatgaaaacagcaaaaaattataagttctggtttgcaaccggctcacaggatctgtatggagatgagtgtctgcagaaagtagcagaacattcaaaaatcattgtaaacgaactgaacaaatccgggattcttccatatgaagtggtatggaaaccaaccctgatcacaaatgaagtcatccgtaaaacgtttaatgatgcaaatgcagatgaagaatgtgcgggtgtgatcacctggatgcatacgttctccccggcaaaatcctggattctgggattgcaggaataccggaaaccactgttgcatctgcatacgcagttcaatgaagaaattccatatgatacgattgatatggactttatgaatgaaaatcagtctgctcatggcgaccgtgaatatggacatatcgtatcccgtatgggaattgtccgtaaagttgttgtcggacactgggcagcgaaagaagtgcaggaaaagatcgcttcctggatgcgcactgcagtcggtgtcatggaaagcagccatatccgtgtgatgcgtattgcggataatatgagaaatgtagcggttaccgagggcgataaagtagaagcgcagatcagattcggctgggaaatagacgcttatccggttaatgaaatcgcagaagctgtacaggcagttggaaaaggtgatgtggatgcgctggtagaagaatattatagtaaataccagattctgttagagggacgcgatccggaagaattcaaaaaacatgtagccgtacaggcacagatcgagatcggttttgagagattcctggaagagaagaattatcaggcgattgttactcatttcggtgatcttggcgcactgcagcagctgccgggtctggccatccagcgactgatggaaaaaggttatggattcggtggtgaaggtgactggaagaccgcagccatggtacgtctgatgaagatcatgactacaggcaaaaaagacgcaaagggaacttcctttatggaagactatacatacaatctggttccgggaaaagaaggtattctggaagcacatatgttggaagtatgcccaaccatcgcagacggtccgatttccatcaaagtgaatccgttgtctatgggtgacagagaagatcctgcaagactggtatttacctcgaaaaccggtccggctattgcaacatctctgattgatcttggcgatcgtttccgtctgatcatcaacgatgtagattgcaagaagacagaaaaagagatgccgaaactgccggtagcaaccgcattctggactccacagccagatcttgccacaggtgcagaagcatggattcttgcaggaggagcacaccataccgcattctcctacgatatcaccgcagaacagatgggcgactgggcagaagcgatgggtatcgaagcagtttacattgataaagatacgcagatcagaaatttcaagaacgaactgaaatggaattctatgtattataaactgaacaaataatcgtttcaataacaggatggagaaaaaaatgacagataaaaatcagattataaaagagatccgggctggggaaaccagcctgggaatcgaattcggttccaccagaatcaaagcggttctggtaggcaaagagcatgcaccgatcgcttccggaagctatgagtgggaaaaccagctggtggacggcatctggacctacagcctggaagatatctggaaaggattgcagaccagttatcaggaactggcaaaagatgtaaaagaacagtatggagagatcctgacaaagatcggatccatgggattcagtgccatgatgcacggctatatgccatttgacgaagaggacaatcttctggtaccgttccgtacctggagaaataatatcaccgagcaggcgaccgatgtactgaccccgctatttggtcagcagattccacagagatggagcatcgcacatctgtatcaggccatcttaaacggtgaagaacatgtaaaagatatcacatttttcactacactggccggttatatccactggaaactgaccgggaagaaagttctgggtgtcggcgacgcttccggtatgttcccgatcgattcggaaaccgtagattataaccagaagatggtagaacagttcgatgaactgaaaaaagaaaaaggatatccatggaaactgagagagatcctgccacaggttctgtctgcaggagaagacgcaggtacgctgaccgaagaaggtgcaaaacttctggatgtaagcggtaacttgcagccgggcagtctggtatgcccgccggaaggtgacgcaggaaccggtatggcagcgactaacagcgtagcagtacgcaccggtaacgtatccgcaggtacttctgtatttgccatgatcgtcctggaaaaaccactgtcaaaggtatacggagaaattgacatggtgacaacaccggacggtatgccggtagctatggtacattctcagaactgtacctcagatctgaacgcatgggtgaacctgttccgggagaatctggaaagtttcggcgtgaaagtagatactaatacactgtacggtactttatataacaaagccttagagggagatgcagactgcggcggactgcttccatactgctatttttccggagaacatattacacactttgaagagggacgtccgttatttgcgcgtacaccggacagcaaatttaccctggcgaactttatgcgaagccacctgtttacaagtgtgggtgcgctgaaactgggtatggatatcctgttaaaagaagaaggtgtggttgtagataagcttcttgggcacggtggtttcttcaagacaaaaggtgtgggacagaaagtgatggcggcagcggtcaatgcgccggtatccgtgatggaaacagcaggagaaggcggtgcctggggaatcgctcttctggctgcttaccgtaaaaataaaacagaaggcgagagccttgcttcttatctggaagaacaggtatttgcaaaagaagaaagtgtacagattgcaccggatccgaaagatgtggaaggatttgaagcttttatggacagatataaagagggactggagattgagcgtgcagcagtagtacatctgcactaggcaggaggaaactatgttagaagaattaaaaaaagcggtatatgaagccaatatgctgctcccaaaatacaatctggtaacatttacctggggaaatgtcagccagattgaccgggaaaccggctattttgccatcaaacccagcggtgtggactatgacaaactgacaccggacgatatggtgatcatggatcttgagggaaataagatcgaaggaagatacaatccatcctccgatacaccgacgcatctggaactgtaccgtgcatttccgaaaatcggcggtgtggtacatacacactccccgtgggcaaccagctgggcacaggcaggaagaggaatcccgtgttacggaaccacccatgcagattacatgtacggagaaatcccgtgcgtgcgctgcctgacaaaagaagagatcgatacggcgtatgagaaaaatacaggacttctgatcgtagattacttcaaagataaagattatgaggcagtacctgcagttctgtgcaaaaatcacggaccattcacctggggtaaagacggacacgaagcggttcataatgcggtcgtactcgaagaagtcgcaaaaatggcagcccgatgtgagatgatcaatccgcaggtaaaaccggcaccgcaggaattgcaggataaacattattaccggaaacacggagcaaatgcatattacgggcagaaatgaaaaagagacagcagacatcgacagtaattgacaaaaaataatgcaaatggtatcatttacgctggtacatcgaaaacgatgtaccagtaataagtaaaccaataaaaaggaggctgtcgggcgtgtcagcagacgataaagagcaggaagaggcaacgcgggaaaaaaagccgaagatgtccaaaaagaagaaaggtgcgattgttgccgggatttttctggtgctgattgtgatcattgccggagttgtatattatatgggacatcgatattatacaaaaaccaactatatgacggatgatgaagttcaggcattgattgaaaaacagaaagaagagcaacaggagaaagaaacagaggaagaaacgacggtagaggaagaagtggatccggaattgctggaggcacagcagaacatggcacaatatgcatctacggagccaatcactacggatggaaatgtatacaatattatgctggttggtctggatacgacagataaaggctggattgggaactcagactctatgattctgatctctgttaattatcgtctggaacagatttccatgatttccctgatgcgtgatacccatgtaatgattccgggaatcggataccgtaagttgaatgccacgtatcccaatggtggaggaccattgcttaccaagaccgtagaagagaattacaagattgatgtagaccgatatgttacggtggattttggttcgatgatcgatattatcgatgaaatcggtaccatcgaaattacttttaccccaaaagaagcagaaaatgcaaacaaaagtatcaaacagcagtgcaggatactgggattaaaatctaaaaaatatctgattccgggtgagggaacctatgaatgtaatggtatgcaggcggtggcttatgcacgtatccgaaaagtaggtaattccgattatcagcgcacagaacgtcagagagaggtactgttaaaacttcttgataaagtaaaggctatgagctttgaagatctggatcgtctggcaacccgtctgcttccgttactgacacataacgtaccggaaagtgaattctggggtttactggcaaaagcgccgacattgatgaagtataaaattatttccgatcgcattccttatgatggtatgtatcatggctacaacggggatctcgttccggactgggagcctaccgtacgaaaattgaaagagacgatttatggtgcggatgtactggatgaggaaggaaatgtggtgacaccgacgcaggaaacagaaacagcagataccacaaccggaagtgaaacagatacacagaatacagaagcaacaggcgattccggtcagattgccatggaagcagaaatcggaacgggagatccgtccgcacagattatccgtggaaatgatgcagatgggcaggtagaggaaagcctgcagaataacagtgggaaaaaagctgctgtgatagcggataatacaggtaccacggagagtacaggcggaacgatgaatgaaaaaaaactgaagaatccgtatactgatccggtctttgtcctgcgagttccacaggcaccggaggaagaggacagcaaactggtcgacggtgattatcaatggcagaaacctaaagtgagcaagggaatccaataataaaaagagcagaaaattttatggagcacataaagttttctgctctttttgtgggaaatgagttaaaatccgtgggtgcataagatcctggctgctgcgacagcagcaaaatccggtgtggtatgttttgtctggtttgtagttgaaaatcagacaacaatctgtcatactaagggaagtgaagaaatgtatttctgaaatatcagataccgaattttcagggatacaggaaagaagggctaataatgaaggtatttgcacatcgaggattcagcggaaaatatccggaaaatactatgctggcatttaaaaaagcggaagaagttggctgttatggcatcgagttggatgtacagctgacgaaagacgatgagatcgtgatcatgcatgatgagaccattgaccgaacgaccagtggaacaggaaatattcgtgattatacgtatcaggaattgtgtcttgttgactgctacggaaagtttgaaggaaaatatgactttcagcggattccaacgctgcgggagtatctgacctgggtaaaggatacgggactgcttaccaatattgaactgaaaaacagtgtgtattactacgaacacctggaagaaaaagtaatcgatatggtgcgggaattccagatggaagaccgcgtgattttttcttcctttaatctggtatccatcaacaaatgcaagaaaatgctgccggaagttccaatgggatatctgatggaagcacggatggataatatgggatttttcacagaagaaaatggtgtggaatattatcatccggataagaactttctgacagaagagatggtgcgggattgtcatgcgcatgggattggtgtcaatgtgtggactgtcaacaaaaaagaactcatggaacagttaaacaactggaacgtcgatggtattttcacaaatttcccggatcgggccaaagaactgggacttgaaaaataaaaaatcgtaactgtccgtatctttcgcaacggctgttgaatagttaaaaaaactaatgtcctgttctagagcgtgtctgaaaaatcatttccgcaacctgcaagccccactttgcggtatattttaccctcattcggttgccgtagcccgctacgccgccctcattcggataaaatctcccacaaactgggactcacagctcacgaaaagcctttttcagacacgctctaaaaaaggcataaaagtttcatatttttttaagaattcaattattgcggtgaaaagcatttgtctgtataatagtcataactgatactctctacagaaaacagcaaaacggacataaaaaaagcagagtaataaaagaaaaatcagataatatgaaaaataagcaacgtaattatcgaaaagtctgacagttacgaataaaaggacaggaggaaagaatatggcgggatttaaattaaaagtaacaccggagatggaaagcttaacacaggtatgtgtggaaaacagtaagatggatccgtctctgtatggaaaatacgatgtaaaacgtgggctgcgtgatgtcaacggaaaaggtgtgctggcaggtctgacacagatttcgtccatttgttccacagatgtggtggatgggaaaacagttccctgtgaaggaagattatactatcgcgggtatgatatccatgaactgacgcagggatttttaagagaacagcgttttggatttgaagaagttacttatctgctgttattcggaaagctgcccaacgaaaaagaactggcagactttaaggtcctgctggcgggccagcgatctctgcctaagaactttgtccgcgatgttatcatgaaagcaccgaccaaggatatgatgaatacgttatccagaagtgtgctgacgttatatgcctatgatcataatgcagatgatacttctctgccgaatgtcctccgtcagtgtctgaatcttatcagtgtttttccgatgctgtcggtctacagttatcaggcatataatcattatattaaaggaaaaagtctgtatatccataatccggatccgaaactttctgttgcagaaaatattttgctgatgcttcgtccggatatgcagtatacgcagttagaggcaacgattctggatcttgcactggtgctgcatatggagcatggtggtggtaataactcaacatttaccactcacgtggtgacttcttcaggaacagacacgtattcggcagtagcagccgccctgggttccctgaaaggaccgaagcacggtggtgccaatatcaaagtagtccagatgttcaaagacatgaaaaaacaggtgaaagactggacggatgaggaagaagtaggagcttaccttcgcgcgctgcttcataaagaagcttttgataaaaaaggcctgatctatggaatggggcacgctgtatattccatttccgatccgagagcagaaatcttcaaagggttcgtacagaaactggcccatgaaaagggcaaagacaaagactttgcactttacagtatggtagaacagctggcaccgaagattattggagaagagcgtcatatttataagggcgtaagtgccaatgtggacttctacagcggatttgtgtacagcatgctggatcttccgaccgagctgttcacaccaatgtttgccattgcacgtatcgtcggctggagtgcacaccggatggaagaactgatcaatatggataagattattcgtccggcttataaaacagtaaaagaagaagaaatttaccgtcctctggaagaacgataaacaaagaagaaaggaagcgttataaacatgaaacgagcaggtctggtactggaaggtggagcaaacaggggtgtttttaccagcggagcactggactatctgatggaacaggatttttatatcccgtatgtggttggaacttccgcgggtgcgtgcaatgcggtggattatgtgtcaaggcagccactgcgcacaaagaaatgtaccattattacggataagaagaagcgttatgtaacaataaaaaatacactgaagacgggaacattgctggatatggatctgatttttgaaaaatatccgaatgaaatctttccgtttgattttgatactttcctgaattcggatatgcagtgcgagatggtggtgaccaactgcattacaggaaaagcggaatatctgagcgaacactccagtgcaaaacggatgatggatatctgcagagcgtcgtgcagtatgccgctggcgacgaaaacagtatttgtggacggcattccgtatgtggacggtggagtggccgattccatccccatcatccattccctgaagacaggacatcagagaaatgtaatcattctgaccagaaataaaggctatcggaaacattccagcggaaaacaggaccgtctgtttgaactcgcttacggaaagaaatatccgaaactggtcgaaatactcgaacagcgtgcaaaagtctataacaagacgttgtattatattgacaaatgggaaaaagaaggaaaagtatttgttctcagaccggagatcgagccggtagcccgtctggagcgggatacacagaagctggagaacttttatcagcatggttatgatctgatggaagagaaatttgaggaaatgaaatggtttttaaaccgttgattagagggagaacaaaagatgctgtttgaaacattttatccggatacctgggtggattccacctatcagattgattttgatgaactgtataaaaaaggataccgtggccttatctttgatatcgacaatactctggtacctcatggagaaccggcagatgaacgggcgaaagcgttgtttgcgcatctgaaagagcttggtttttcctgctgtctgttgtcgaacaatcagctggagcgtgtgcagatgttcaacagagatgtgcaggtgcattatatcgaggatgcacataagccttcccgcaaaaattatctgaaagcgatggaactgatgggcacggatttgtctgatactgtgtttatcggtgatcagctgtttaccgatgtatatggagcaaagaggacaggaatggcgaatatccttgtgaaaccgatccatccgaaagaagagattcagattatactgaaacggtatctggagaaaattgtgttgcatttttatcagaaaaacaggaaatctggtcgtatttgaaaaaattagttgaaaaatccctgtagttattataaaatatgagtagccaagctcaaatatattaagaaggcagatacccggaaatcaccgggtattgtgagttataaggaggaatatcatatgatttcagcaggagatttcagaaacggtgtaacattggaaatcgatggaaacgttgttcagattctcgaatttcagcatgtaaaacctggtaaaggtgcagctttcgtaagaacaaaattaaaaaatgtcatcaacggtggtgtggtagaaaaaactttcagacctactgaaaaattcccacaggctcgtatcgacagagtagatatgcagtatctgtatgcagatggggatctgttcaactttatgaacatggaaacttatgatcagatggcagttgataaagatactgttggcgattctctgaaatttgtaaaagagaacgaaactgttaaagtatgttcttataacggaagtgtattcgctatcgagccgcctctgtttgtagaactggagatcactgaaacagaacctggattcaaaggtgataccgctcagggtgctacaaaacctgcaactgttgaaacaggcgcacaggtaaacgtacctctgtttgtaaatcagggagataaaatcaaaatcgataccagaacaggtgaatatctgtccagagtataagatttaacagtcgaaattgataacagatcgtaaagccccggaaaatacaggattttccggggctttgtttttgaaccattgcatagcagcaattggcagtggatcagtttagagtatgcggtatgtctcgggttttctgtggcctttgctcacaaaaaacacatcacaggatattaccggtgaacaataactgttgatggtaacaatgcagacagatacaagaaattgcttgcatttttaagagaaaacatgtatgatataaaagtaatttacatttctatttcagtgacgtttcgtcacattttccccatatgaacatctgaaattcataaaaatcaaaggagaacaatttgaattatcaggaatttcgatgtgaatttttagaacgaatgaaagaagttatggaagaggaggtgagtattaccaccgaaaaaatcaacaaaaataacggagtcgttatggaaggtcttgtattaaaaagtgagaatgcccgggttgcttcgatcttttatatggaagattatttttcttactgggaaaaaggagttccgctagaacagctggttcggaaagtgatgtggcaatttgaacattgcaaacctcagatggatgtggaagcggatttttttcaaaattatcaggaaatcaaagaaaacatctgttttaaactgattaattacgagagaaaccgggaactgttaaaaaaagtcccgcataagcgaatcctggatctggcgatggtattttattatcggatccagaaagatgagacaatgcaggcaaccattctgatagagtatgctcatctgaacgcatggaaaattacgcaggaagaactgatcgaaaatgcaaaacgatatacatatctaaaactgccggcagaatttattaatatgaagggtctgctgggtctggtacagggaaaagaaaagcaaatgtatgttttgactaataaagaacggtcactgggagcaggaacattcttatatccgggcgtgttaaaacaggctgaagaacttctgggcgagcgattctatgtgttgccaagtagtattcatgaatgtattctgatcccggaggaggaaggaatgtatcaggaagcactgacagaaattgtaacggaaatcaatgaaagtcaggtggatccgaaggaggttctgtcggatcaggcgtatttttacagtgcggaagataaaagagttcatttgtgaaagcagcagatgacggataagttttaggttactgggaacggagtgaacagtaacagttttggcgaacaagactctttacaaacgagagcagatgtgttattatttataaatgtgagtaaggtaaaagtctcacggatacgcatctgtagctcaggggatagagcaatggtttccggtaccatgtgtcgggggttcgaatccctccagatgcgtttctttttacatttttccggaagaacggaagaaaaatcaggatcgtacccagtcataaggaggcatacgatatggatgatttcagagaatggctgtcagataatcttagatatttcatgttgggatttggcattctggcagtggtattgattttatttttcggtgttcgttttatttcctcaaaattcggaaatcagaaaacaaccgaaccgaaacaggagacacagcaggagacggaaacaccgacgcaggaagcagaagaaacaccggcaacaaccgcggaaccggaaacaacaccggcagcaggagaactggaactgaatgcctatccgcaggtcaatgcactgatagaaaaatattatgcagcactgacaggcaaagacgtgcagagtttaaaagaactggtggatgaactggatccgtcagatgaaagtgcgatcacgaattctcagtatattgaaggatacagtaacgtacaggtatatacaaaaaaaggcatgacagataccagttatgtggtatttgcagcttatgatcataagtatgtgggttatgatacacttctgccaggaatcagttatctatatgtggatacaaaagaagatggaagtttgtatattgtggcagatccgaacgaggaacagcttgcatatatcagtgaacagcttgaagatgcccagatacaggaactgctgaacagtacacaggcatcttatgatgaaaaactggcttctgatgaagctttgtcgaaatatctgtcagaacttggagtggaaggatctgcggccatggaagcagcagaaggggcgcagattaccgtaaaatccaattgcaatatcagaaaagaaccgtcgcaggatgcagaatccatcggcaaactggtgggtggacagactgtgaccaagaccggtgaggatggagattggattaaaattgaatttgaaggacaaactggctatgtaaggggcgatatgttccagtagacagaaaaaaaaggactgttgccttgatcgatttcagaaggtattctgaaaaggttaaagtaacagccttttgctttacagggaaaaaagcacctgaacaccggaggagtaaaagaatggaaagtattcggttgaataaatatttgagtgatgcaggaatctgttccaggagacaggcagaccgctggatagaagaaaaaagaataacagtgaacggagaaattgccggaatgggaatgaaagttgcaccggacagcgaggtatgcctggatggaaaactgattaaaaaagaagagaaaaaagttcttctggcgatgaataaacctgcggggattgtctgtactgcggagaaaagagaaagaaataatattgtggattacatgaagtatccgaaacgaatctatccggtgggaagactggataaggattctaccgggctgttactgctgacgaatgacggagaactggttaacaagatcatgcgtgccggcaattatcatgaaaaagaatatctggtatcggtaaataaaccggtaacggaggaattctgcagaaaaatgagtcgcggagtggcgattcttgatacagtgacccgtccctgtaaagtggaaaaaacaggagaaaaaagttttcggatcattttgacacagggattaaaccggcagattcggaggatgtgtgagacactgggatatcgggtgatgactctgcaaagagtcaggatcatgaatattcgactgggaagtttaaaggaaggaacctggaggaacatcgagggagaagaacgaaaagaactggatgccctgttgtctgattccagttcattgtccgtgaaagaacgaaatgaaaaacagagagaaagaagaggtggcatatgaacgcagaaaaaagacaacaggcgatccgacggatgaaagaactgtcgggaatactgaaagaagcatcccgcgcatattatgctgaggacagggaaatcatgagcaatctggaatatgatgcactgtatgatgaactggtaaaactggaagaagagacacagatggtcctggcaggaagtgctacgactacagtgggatatgaggcggtggatgaactgccgaaagaggcacatgaaagtccgatgctttctctggataaaacaaaagacagggaagtgttacgaggattcataggggatcacaaaacactgctctcctggaaaatggatggcctgaccgtggttctcacttattatcagggaaaattgcaaaaagcagtaacacgtgggaatggagtagttggtgaggtgatcaccaataatgtacgggtatttgataatattccgttaaagattccatatcagggagaactgactcttcgcggagaggcaattataacatattctgagtttgaaaaaattaacagtcaaattgaggatgtggatgcaaaatataagaatccaagaaatctatgcagcggttcggtacgccagttaaacaatgagatcacagcaaaacggcatgtacgtttttatgcattttcgttggtaaaagcagatggagtagattttgaaaattccagacaaaaacagatggaatggttgaacgatcagggatttgaagtggtggagtatcgtgtggtgacaggaactgaactggatgatgcgatggaatattttgcaacacggattgaacaaaacgattttccatcggatggactggtggcgctgtatgatgatattgcctatggtgattccctgggaagaacagccaaatttccacggaatgcttttgcgtttaaatgggcagatgagatggtggagactacacttgagcaaatcgaatggagcccgtctagaaccggtctgatcaatccggtggcaattttcacgccggtggagctggaaggatctacagtgagtcgggcaagtgtgcataatatcagcattatgcgaaaattggaacttggcattggtgatcggatcagagtttacaaagccaatatgatcattccacagattggcgaaaatctcacgaaaagcggtgtaaaagatattccttccacctgcccggcatgcggaggaaaaactgtgatcgaaaaggtgaatgatgtggaagccttatattgcaggaatccggaatgtccggcaaaggcaattaaagggtttacattatttgtcagtcgagatgcgatgaatatcgatggcctgtcggaggcaacactggagaaattcattgccagaggttttatcaagaattttggggatatttttgaaattggcaaacataaagatgagatcatccggatggagggatttggagaaaaatcatatgaaaatctgatagaaagtctgaaacgggcgaaaaagacagaacttccaagggtgctatatgcactggggattcccaatatcggtcttgccaatgcaaagatgatctgcaaagaactgaattatgatatggaaaagattcgttatgcatcggaagaagaactggcggcgattgacggtattggtcctgttatagcaaagagttttgtgaactacttcaaaaaagaaggaatacaggaaaaactggatcatctgctgtcgcatctcgaaattgaagcggcaccaaaacaggtagaaacacagatttttgagaacatgaattttgtgatcaccggaagtgtggaacattttgctaatcgaaaagaagtgaaagaggagattgagaagaggggcggaaaagtaacgggaagcgtgacttcgaagacttcatatctgatcaataatgatacccggtcggcctcttcaaaaaatcgaaaagcaaaagaactgggaattccaatcatttcggaagagatgtttctcaagatgatggaagagggagtataagttcgctgcattgactttcagaggcagattgagtagaatgtacagtaacaatggagaaaagaactactgaaaatgtgaaaaaagacagaagataccatagtggaacagaaagaatcaggtgcatataatgggaaaaattcagagaattcgggaatcgaaaacgggaaagacaatagtaaaaaaaggaaagagtggcattggccggattctgtttgggcggaccggaatcatccttctgttactgcttttgcagctggggattctatttattgtgttcagcagactgcaacagcatataatttatgcttactggtcgtttgtcctgctctccgcgctgacagcgatactgattatcaaccgaccgggaaatccggcgtttaagctggcgtggatggttccgattacattctttccggttttcggtatgttgctgtatctgtttgtggaatttcaggcgggaacagtgtggctgaatcatcgtcttcaaaatgtagaacagcagatgcgaaaatatgttttgcaggatcccgatgtttttgaagaactggaaaagacagataaacgggttgccaatttatccagatatgtgacagaaaaaggtggttttccgacgtataaaaattatcatacgacatattacccatgggggaaagacaaattcgaagcattaattgaagaactgaataaagcggagaaattcattttcatggagtacttcattgttgcggaaggaaaaatgtggaacactgtgctggagattctgaaaaagaaggtacaggagggcgtggaagtccggtttatgtatgacggtacctgcagtatttcgctgctcccgtataattatccgaaaaaactggaggaatacggaatcagatgtaagatattcaatcccatcaaaccggcattatctacggtgcagaataaccgtgaccacagaaaaattgtagtgattgatggaaagacagcttttaccggtggtgttaatcttgcagacgaatatatcggagaactggaaaggtttggaacctggaaagatactgcgattatggttcagggagaggcggtaagaaactttactctgatgtttctggaaatatggaacgtagatgaaccgcaggagaattatgaaaaatatctggatgcatcttattgttatggcatgacggaaggggaaggctatgtgattccttacggtgacagtccgctggatcatgagaatgtgggcgagcttgtctatatggatattctgaacaatgcaaaagattatgtgcatattatgacgccatatctgattctggatcatgagatgctcacggcacttacatatgcggcaaaacgtggtgtggatgtaaagattattatgccgggaattccggataaagcgtatgcgtttgcactggcaaagacttactatcctgaacttttgcgggcaggtgtgaagatttatcagtataaacctggttttgtccatgcaaaatctttcacttcagatgactgtaaaggggtagtgggaactatcaatctggattaccggagtctgtttctgcattttgaatgtgcagtatatttgtaccaggtaccacagattgcagatgtggaggcagattttcaggagacgttgaaagactgtcgggaaatcagcatggaagactggaaaaatgagaaatttattacgaaattgacgggaagagtacttcgactgattgccccgttgatgtaaattaaaaagtagacaggagatgtgtaacaatgccgattaagatacaaagcgatttaccggtaaaagagattctggaacaggaaaatatatttgtcatggatgatacccgtgcgatgcaccaggatattcgtccgattcagatcctgattctgaatctgatgccattaaaggaagagacagaacttcagctgctccgatctctgtccaatacaccgttgcagattgatgtgacctttatggcagtggcgagtcatgaagcaaagaatacttcccgaagccatttgaataagttttatataagctttgaacaggtgaaagaacagaaatttgacggtatgatcattaccggagcaccggtagaacagatggagtttgaagaagtggattattgggaagaactgacggagatcatggagtggagcaaaagtcatgtaacatccactattcatctttgctggggcgcgcaggcgggactgtattaccactacggactgaaaaaacgtcagctgtcaaagaaaatgttcggtctgttctggcatgaagtgcagaacagaaagattcccctggtgcgtggatttgatgatctgtttctggcaccccattcccgtcatacagaagtttcagcagaagatattcataattgtaaagcgctgaccgtactggcagaatccagagaagcaggagtttttctatgtatggcaatgggtggacgtcagatttttgttatgggacatccggaatatgaccgggtgacactggacggagaatataagagagataaaggtaaaggactggaaattgaaattccggctaattattacccggagaatgatccggagcttcgcccgagacttctgtggagagcacatgcaaataatctgtataccaactggttaaattactatgtatatcagtgtacgccatatgatcttgaaggaacgccgttctaaaaagaaaaatctgtcgaaccctgtcagaaaatcaggaacgaatctttgggttttcaaagaaagtacgttgctaaaaaaatatccgccatctataataaaagcatgaagcacagagcacgttaaaaaaacaatgtgtggatgttacaaaaaataaaaatatgtacgtgacaaagatggcgtacaggaaaggatgcggatgtgagatacgaaagtgaagaaaagaaaaatctgatttacgacctgatgaacggaagtctggtcctggatgaagtaaaagatctgtggaaagaccaggtagtagatgaattcgccaaagggtcttactgcagtgaactttacgaagaagtgtatcaggcaaaagtgtcattatgtaatcgtctcggagtacaggaagacagtgatattgagacagttatttccaatttgttgctgatcggaaaacatctttcgatgaagatgtttgattacggaatggaagaagaacgaaaacaagagaaaaaacacatttgatgaaatttcctcttgcaaatctggagatttcctgtaaaatagtataggattatatggaaagccggtggtctgtaaagatctccggcttcgtatatgagcaaccagaaactttcatagaggaaaggaaacgaatatgattgcagcaaataatgtaacattgcgaattggaaaaaaagctttatttgaagatgtaaatattaaattcactgaaggaaactgttatggactgattggtgccaatggtgccggaaagtctacctttctgaagattctctccggacagttagaaactacgaatggtgatatcactatcacaccaggacagagactttctttcctgcagcaggatcatttcaaatatgatgcgtatcaggtgctggataccgttattatgggaaatgcccgtctgtatgaaatcatgaaagaaaaagaacaaatttatgcaaaagaagactttaccgaagaagatggtatccgtgccagtgaactggaagcagaatttgcagagatggatggttggaatgcagaatccgatgccgagcagctgttaaatggtcttggaattccgaccgagctgcattatgcacagatggcagacctgaatggttctgaaaaagtgaaagttctgcttgcacaggcgctgttcggtaatccggatatcctgttgcttgatgagccgacaaaccatttggacctggatgcgatcgcatggcttgaagaatttttgattaactttgaaaacacggttattgtggtgtctcacgaccgttatttcctgaataaagtatgtactcatactgcagatattgattatggtaagattcagctgtatgcaggtaactacgatttctggtttgagtccagtcagttgctggtaaaacagatgaaggaagcaaacaagaagaaagaagaaaagatcaaagaactgcaggagttcatctcccggttcagtgcaaatgcttccaaatcaaaacaggcgacttcccgtaagaaagccctggaaaagattcagctggatgagatccggccttccagcagaaaatatccatatattgatttccgtccgaaccgtgagatcggtaatgaggtgctgatggtggaaaatctttccaagaccattgacggcgtgaagattctggacaatatttcctttacactgggaagagaagacaaagttgcattggttggtggcaatgagcaggcaaaaactgttctgttcaagatcctgatgggtgagatggaaccggattccggtaattacaaatggggtgtaacaacttcccaggcatatttcccgaaggacaatacaaaagattttgataatgatctgacgatcgcagactggttgacgcagtattctgagatcaaggatgccacttatgtacgtggatttcttggaagaatgctgtttgccggtgaggatggcgtgaagaaagtgaaagtactttccggaggtgagaaagtacgttgcctgttatctaagatgatgatttccggtgcgaacatcctgattctggatgaaccgaccaaccacctggatatggaatccatcaccgcattgaacaacgggctgatcaagtttccgggtgttctgttatttgcatcccatgatcatcagttcgtgcagacaacagcaaaccgtattatggaaatcatgccaaacggatctatgatcgataaaattacaacctatgatgaatatctggcaagtgatgagatggcaagaaaacgtcaggtttatctgatgcaggaagaagataattaaataataataagagcggttttatttatcgaaacagctttatgagacaaggagcactgcccgtgaagtcgggcaggctccttgtctgcgttttcgggaaaatgaagaaacgttcatatgttcaaacgtaatggttccgtactctggtatcctgacggaaagggaatgcacagatacatgaaaatcaaaagaaaagaggagtaattatgacacattgtttaaatacattagcaaatttaattcagcagtatatctggctggcaccggttctggcactgctgggaggtcttgtgacttcttttaccccatgctcgttatccagtgttccgatggtcattgcctatattggcggatcagcaaaaaatgatacaaaaaaggcgtttcgcctgtccctgaccatggcgggcggtcttgcactgacgtttttgatctttggttcactggcatctgtgctgggacattatcttcatgagataggagcctggtggtacggcatccttgggacaatcatggtactgatggcattgcagatctggggtgtgataagaattttaccgaatcatccacatgatcacggaacaggagaaggccacggggaacatggctgtgaatgccatgatcatcaccatcaccatgaagaagaacatcatcatccggtggattgtcaggagggggacggacaatgccactgcggtccgaaagtaacaaaaaaagggtatcttggtgcgctgcttgcgggaatggtgagtggagcggtggcttctcattgttctacaccggtgatgatcgcgttgcttgcgatggcggctcaggccgggaagacggtctgggggatttttctgatggtaatgtttgcgattgggcacagtgttttactggttacggcgggaacgagttacagtgttgtggagagatggatgtatgatccaaagtatgaaaagatcagtaagactttgcggacagtgatgggagttttgattttgctgatcggggtggctatgatttatttggcgatggtgcatgaagggtaggaacgaaaaactactcgtcatgcaacggacgaaagcccacgcttgcccggtaagggcagacaaccgctggcaacgccaagctgagctaagggcgccagcataaggctgtctgtccttaccgggcaagcgtgggctttctggtggttagtgacggcaggaaaagataagtaagtgaagaaaattgtacagatatggaataagctatagaactcccggtggtattagagcgtgtctgaaaaatcatttccgcaatctgcaagccccactttgcggtatattttaccctcattcggttgccgtagcccgctacgccgccctcgttcggataaaatctcccacaaactgagactcgcagctcacgaaaagcctttttcagacacgctctaagagacagactcaaatttgacttcgattaccgggagttctgtatagtatcatatttgtacagcacttttagtctaaagtaaacgagataaggtctgtttcatggattttatctcgttttctcggcagatattaaagtgttgtgcaagcatggttttggttcgttgcctatgcaaattagagtttacagaatgttttgttcatcagaattccctgcagcagtcttccagcaggtggaagaattgttctgcgtggtagccgtcgttgacggcgtggtggaattcggtagtgatcgggatttttacccggccgtcaacctcatgatattttccaatcatgacgaaggggacgtaactgacggtaggggtgttgtagtgggtgaaagaatctggtttggagtaactcagtgccgtataagtggtgtttggcataatggaaatatgtacgttgttcaggtcgtcttcctttggataatacagagtttcgcaggcttccccaaggactttatcttccagaaattgtttatggaatgcagcaaaatcctcgctataatcagtccactgatgggtgaagagatggttggaatttgtgcgaagcagagtgtaatgcgggttgacctgatcgaagtaacctacctggccgttgattttggcatagcgataatcctgatgtccatttacggttttggcgatgcagtagcacatggatggatagaatttccagtgattttcgtgaatttttttgagaaactccgtgatatccagttctacagtcatacagtacaaatatccgtgaaaggcatcgtagatttctttccgatcccattgttcataatcaattggaataaacatagaagtcatacctcctttaaaaacagaaaatgatttaaaaaaaggaacagttctcatactgttcctttttaagatacaatagaattacaggcaggaagccgcctcttcatccagaacaacggttacgtccgggtgaagctgaaggatggaagccggtacctgaggacgaaccggtccgaagagagcttcttttacaatggctgctttgtcttttccactggcaatcaacagaatccgttttgcacgcataatggtgccgattcccatagtataagcctgtgtaggaacatcttccggtttgtcgaagaaacgggcatttgcctggatggtgctctcggtcagatccacacagtgagtgaatttagggaaatcttctgcaggctcattaaagccgatatgcccgttatgaccaagacccagaagctgcagatcggtgccgccacagttctttacgattgcttcaaagtcatcgcaggctttctgcgcatccggttcagtaccatctggaatatgagtgtgagccgggtcgatatttacgtgagagaacagattatcattcataaagtaataatagctctgatcgttgctatgtgtcagtccgcggtattcgtctaaattgacggtagtaacttcagaaaaatccagatccccttttttgtaccagtctaccagtgtcttataagcaccgaccggtgaagaaccggtagcaagacccagaacgcagtccggtttagtaatgatctgtgcggaaataatattggcagcttttctgctcatgtcgttataatcttttgttacaatgattctcataaaaaccctccttagagatcttacatattaaaaagcgctgttcaaataatgcagctgcatctaaaaatacgttatcccatttaccgcaaaaaagcaagggaaaagaaaaaacagaaagtagttactgagcacggagtggacagtaacgaaacgagtgaacagtagccctgccacaaatcagtgcagggcgttcgcggtgtcttcctccgataatgctttgatagaaagtgcatattccgatggagacatcccggtaaaggttttgaactgcctggaaaaataatggatggaagtatagccgagcgcatacgagatttctgtaaaatttgcctgttcctggcggatcatctgtttggcttcctcgattttcagataagaaaaataatggatcacgccgcagtgctgttctttctggaaaagtttttgcaactgagactttccaaccagattcgcctgacagatctgatccagggtcagctggctgcgtagatgatccttcatatatagcagaattcgctgatagagaatggtatcgttttctttcctggtggatttttcggaaggatccggtttctctttttgatttaggcggcgaagcatcgatagaagaagcagttcaaggtaaagctggatcatctgttctgaggcaaaaggagaatcggttcgccgttccattttcttggtaaacggattatccagtggtgttgcgatacagtgtcgagcttcgcggataatctgggcaagaaaggtcttttcggtttcactgatggtggtgatgagattacgaaactgcttcatacaggaagaatcacaggaaaaagaaatgactacgaggtttggagcaattttcccgtttgcctgtacattatggaattcattgggttcatgaaagatgatctgtccctgttgtaaggtcagttttttttcgccggcagtaacagtaacttcccccttgtctacgcataagaactcccagaaatcatgggattctccgtggaagtgatacgtattggtatattcaaaatagtgaatggtgataatctgtgtaatgtgcagttcttcggttaagagaaacggctggtaggtcatggtcaagcactcctttcgggaaaaagtatcagatatgtattttatgaaaagaagtataaaataaaaattgtataaaagcaagttttgtgcaaataaaagcaaattttgtgcaaatcaataaaagagaaaacatggtaatctataggaaacagataacatgaaagaaataaaacagtggctactgaaaagttactaaaaatcataataaaagaaaagaggaagataacatgaaaaaaccggtattggtaattatggcagcaggtatgggaagtcgttatggaggattaaaacagatcgatccggtcgatccggaaggccatatcattatggatttctctctgtatgatgcaaagaaagcaggatttgaagaagttattttcattattaaaaaagaaaatgaaaaagattttaaagaaaccataggaaatcgaatcagtaaaatcatgaaagtttcttatgtattccaggaactgaccaatcttccggaaggctaccgtgtaccggaaggcagagtaaaaccatggggaaccggtcatgcagtgctgagctgtctgggaactctggatgcaccgtttgcagttatcaatgcggatgattactacggaagtcatgcatttcagatgatatatgatttcctgaccacccatgaggacgatgaaaaatatcactatctgatggtaggatatattctggaaaatacactgaccgagaatggtcatgtagcccgtggtgtatgcgagacggatgcagacggttatctgctgggtattcaggaacgaacccatatcgaaaaaagacctgatggtacaactgcgtataccgaagacgagggcgcgacttggaccgtgattccggaaggaagcaccgtttccatgaatatgtggggattcagtgcaagccttttaaaagaactgaaagaacgcttcccggcatttctggatgaagcaatgaaaacaaacccgttaaagggagagtattttcttccgtctgttgtaagcgagctgcttgcagaagacaaggccgatgtaaaagtcctgaaatctctggacaaatggtatggcgtaacatacaaagaagataagtcggttgttgtaaatgctatctgcaaactgaaagcagaaggaaaatatccggaaaaactgtgggaggaataagatcgtggagcagataacaaaagaagaacttctggatgtgatcggaaaattcgaactaggaaatcatatagaagtagtcagcgtggaaccctatggaagcggacatatcaacgatacgttccgccttgaagtaaaggaagacggtagggagaaactgtatattctgcagagaatgaataaagatatttttaaaaatcagaaagaactgatggacaatattttacaggttaccagttttctgacagaaaagatcaaagagcagggtggcgatccaaaccgggaaacattgcaggttatccctaccaaagagggaaaagcctatctgacagaggaaaatggtgacggatggagagtgtatccgtttattacagattccctgagttttgataaggcagatacaccggaagcaatgaaaaagagtggttatgccttcggtaatttccagtacctcttatccgatttcccggcggaaaagcttcatgagacgataccggattttcataacacagttgatcgttatgcaaaattcgaacaggcggtacagaaagatgtaatgggaagagtaaaagaagtggaagcagagatcagctttataaaagaaagagaaaaagactgtcactacttcggagatctgctggcagcaggggagattccgctgcgggttacacataatgataccaaattaaacaacgtgctgtttgataaagcaagcggcaacgccatctgcgtcatcgaccttgatactgtaatgcctggatttgcagcccatgattttggtgatgcgattcgctttggtgcaagtacagcagcggaggatgaaaaagatctgaacaaagtatcctgtgatatgactcttttcgaagcgtactttaatggctttatggaaggatgtcgtggcagcctgactgacaaagaagtggaagcacttccgatgggcgcaaaaatcatgacctttgagtgcgggatgcgtttcctgacggattatctgcagggagatacctatttcaaaatccattatccggaacagaacctggatcgtgccagaacacagttaaaactggttaaagatatggaagaaaaatgggatatcatggcacgaatcgtaagaaactaaacgattttatacattttgccgaataaaaaagaagagaaaaatcatgaaatgtttttttataagaacatttcatgatttttttgtaaaaaatggacaggctcaacaaagagtgatataataaaaataaggttgaaattatgtaaaaacaactttattttttattcaaataaggaggaatttgaaatggcaagaaaaatgaaaaccatggatggtaatcatgctgcagcacatgcttcctacgcattttccgatgtggcagccatttacccgattacaccttcatctgttatggcagaagctactgatgaatgggcaactcagggaagaaaaaatatgttcggacaggaagttcaggttacagagatgcagtctgaagccggtgcagccggtgcagttcacggttctctggcagcaggtgctctgacaacaacctatactgcttctcagggtcttctgctgatgatcccgaatctgtacaaaattgccggtgaacagttaccaggtgtattcaacgtatccgcacgtgctctggccagccatgcattatctatctttggtgatcattccgatgtttacgcctgtcgtcagactggtgttgcaatgttgtgtgaatcttccgtacaggaagttatggatctgactccggttgctcatctggcagcaattaaaggaaaagttccattcatcaacttcttcgatggattccgtacatctcacgagatccagaaaatcgaaacatgggattatgaagatctgaaggatatggcagatatggatgctatcgatgcattccgtaaacatgcactgaatccaaatcatccatgtcagagaggttctgcacagaacccggatatcttcttccaggcaagagaagcatgtaacccgtactacgatgctctgccggctatcgtacaggaatacatgaacaaagtaaacgaaaagatcggaacagactacaaactgttcaactactatggtgcagctgatgcagaacatgttatcatcgctatgggatctgtaaatgataccatcgaagaaactattgattatctgctggcagcaggacacaaagttggtgttgtaaaagttcgtctgtacagaccattctgcgcacaggctctggttgatgctattccggaaactgtaaaacagatctctgttctggacagaacaaaagagccgggagcactgggcgagcctctgtacctggacgttgttgcagcactgaaaggaacaaaattcaatgatacacctatctttaccggacgttacggattaggttccaaagatacaacaccggcacagatcgttgctgtatatgaaaatacaacaaaacagaaattcacaatcggtatcgtagatgatgttaccaatctgtctctggaaacaggcgctcctctggttaccacaccggaaggaactatcaactgtaagttctggggtctgggtgcagacggtactgtaggtgctaacaagaactccatcaagatcattggtgacaatactgatatgtacgctcaggcatactttgattatgattccaaaaaatccggtggtgttacaatgtctcacctgcgttttggtaaaaaaccgatcaaatctacatacctgatccacaaagctaactttgttgcctgccacaatccgtcctatgtaagaaaatacaacatggtacaggaactggtagacggtggtacattcctgctgaactgcccatgggatatggaaggtctggaaaaacatctgccgggacaggtaaaagcatttatcgctaaccacaacatcaaattctacatcattgatggtgttaagatcggtatcgagacaggtatgggaccaacccgtatcaacacaattctgcagtctgcattcttcaaactggctgacatcattccggaagctcaggcaatcgaactgatgaaagcagcagcaaaagctacttacggacgtaagggtgatgacgtagttgctaaaaactgggcagctatcgatgaaggtgcaaaacaggttgtagaagtaactgttccggaaagctggaaagatgcagctgacgaaggactgaccatgactcatgcaacaagcggaagacaggatgctattgatttcgttaataacattcaggcaaaagtatccgctcaggaaggaaacagcctgcctgtatctgcatttacagagtatgtagacggaacaactccatccggaacatctgcatatgaaaaacgtggtatcgctgttaatgtacctgtatggaatccggaaaactgtatccagtgtaaccgctgtgcatatgtatgtccacatgcagcaatccgtccggttgccatgacagaagctgaagctgctgaggcaccagctgctctggatatgacaggtatgaaagaatacaaatttgctatcgcagtttccgctctggattgtaccggatgtggttcctgtgctaacgtttgcccaggcaagaaaggtgcaaaagcactggctatggaaaacatggaagcaaatgttgcatctcagaaattcttcgattatgcagtaactctgccggagaaagaagatgttatcgcaaaattcaaagaaaatacagtaaaaggatctcagttcaaacagccactgcttgagttctccggagcttgtgcaggttgtggagagacaccttacgcaaaactgatcacccagctgtttggtgacagaatgtacatcgctaacgcaacaggatgttcttctatctggggtaactcatcaccatccacaccatatacagtaaatgcaaaaggacagggtcctgcatggtccaactctctgttcgaagataacgcagagttcggttatggtatgctgttagctcagaaagcaatccgtgacggtctgaaaacaaaagtagaagctgttatggaaagtgaaaaagcttctgatgaagtaaaagcagcttgtaaagaatggatcgataccttcagtgtaggtgctaccaacggtgctgcaacagataaactggttgctgctctggaaggatgcgaatgcgatacctgcaaagacatcgttaagaacaaagacttcctggctaagaaatcccagtggatcttcggtggtgacggatgggcttacgatatcggtttcggtggtgtagaccacgtactggcaagcggtaaagacatcaacatcatggtattcgatacagaagtttactccaacacaggtggacagtcttccaaatctacacctacaggtgcaatcgctcagttcgcagctggtggtaaagagaccaagaagaaagatatggcatctatcgctatgtcctatggctatgtatatgtagcacagatttccatgggtgcagacttcaaccagactgtaaaagcaatcgcagaagcagaagcatatccgggaccatctctgatcatcgcttacgctccatgtatcaaccatggtatcaagaaaggtatgagcaaagctcagactgaggaagaactggcagttaaatgtggatactggcataacttccgcttcaacccggctgcagagaacaagttcacactggattccaaggcaccggcttctgaagattaccaggcattcctggacggcgaagttcgttacaactctctgaaacgttctaacccggaaaaagcagctagactgtttgctaagaacgaaaacgaagcaaaagaaagatatgcatatctgaacaaactgatcactctgtacggaaaagaagattaattcctgaattaagatttttctgtgagaatgaatcaaaattggttcaccggatcaattttgatatgcaatgaaatgaaagggctgtcgcgcatgcggcagtcctttttgcaggttatgaaccaaagtccttgtctgcatgaaattttgtccggtgccgtaacgagtgaaacaagttttgcatgtttcactcgttgttcttaagagtgttttatgttatacttaatgataaacgacgtgaatgaaagcagtcgaaggaagacgaaaggatagatagaaaaatgacagtagatcaggtgtttattattaaaaaattgcagaatctggacgagatgctggtagcatattccgcagtgacacgaatgccctttgccatctgcgatgatgagagttttaacgatcaggtatggatttttaccgatcaggataaattgaaaacatttgcggaaaaatataaagaagaaaagaaacttattcttccggtaaaagtgcagaaaaaggatgcatcgatgttctacatgaatctgtttgccatgggaatcaatgaagtagtattttgcgatggcgatcaggaaaacaagattgaactgacaaaaattgtcagaatgccggatgtggatgctttgccggaaaatcggaaaccgatcctgaacccgcagttacagctgtctgcggcttattttctgcaggagttacgaaaaccgggagtggagcctgacagagaagcattaaaagatctggaagaggagatgtcagcgaatcttgcaagatccacttatctgatgccggtagatgtggaaaaagatgaagaaggcaaagaaaatgtccgcctgctctatgtacagaataaaaagggagaacgttatcagccaatcttttcagataccggagaactggtgaaacattatcgtggaaaagaagtacagaatcgtctgatccaggtgcgtttcgatcagctgtcgcgttatatgatcaaagatgtgcagggttatgttctgaatccggaaggaatcaatctgattttgagaacgcagcagattgaactgctgaatagttattacaatggaaagaaagagacacagaaaccggaagaaaactagccggatgtgtgagatgggaggcaggaatgcagattacagattgcagtgcttatgaaattttacagaaagaaagaatcgaagacgtccatgccgacggatatctgctgcgtcataaaaaaagcggagcaagagtaatgcttctggcaaatcaggacgagaataaagtatttaatattattttccggacgccaccggctgacagtaccggtgttgcacatattctggaacacagtgttttgtgcggatcccgggaatttccattgaaagacccctttgtagaactggtgaaaggatctttgaatacttttctgaatgcaatgacgtacccggataaaacaatgtatccggtagcaagctgcaacgaccaggatttcaaaaatctgatgcacgtgtatatggatgcagtattttatccgaatatttatgaaaaggaagagatattccgtcaggaaggctggcactaccagctggagcaggtggacgatccgttaaaatacaacggtgttgtatacaacgagatgaagggggcattttcttcttccgaagaggtgcttgaacgtgagatttttaatgtactctttccggatacgccatatggcgtggaatctggcggagatccgaaatgtatcccggatcttacgtatgaaaatttcctggcattccatggaaaatattatcatccatccaacagttatatttttctgtatggaaatatggatatggcagaacgcctggaatggatggacaaagagtatctgagcaaatttgataaaattactgtagattcccagatcgcaaaacagaaaccgtttgaaaaaacggtggagcataagattttttatccggtaggagaaaatgattccgaagaagaaaatacgtatctgacatacagtatggtagtaggggacggactggatgtaaaacgctgtaccgcttttgaagtcctggattatgttctgctttcggctccgggagcaccgcttcgtcaggcacttttagatgccggaatcggtaaagatgtcgatgggggttataacgacggtatttatcagccgtttttcactgtggaagttaagagcgcagaagaaaaggataaagaaaaattcctgcaggtgatccgggaaacactggaaaagctggtaaaagaaggaattgatcagaaggcgattgctgccggtatcaactatttggaattccgtttccgtgagtcagattatggttcctatccgcgtggactgatgtatagcattgatgtatgtgaaagctggctgtacgatgataataaaccatttgttcatctggaaaaactgaaagcctttgatgaattaaagaaggaagcaggtgaaggactttttgaacagctgattcaggaaaccatgctggataacccgcacagtgctgtggtattgggaatgccgaaaaaaggacttacaacagaggaggagaagaagacagaagagaagctggctgcctataaagcctctctgtctcgggaacagctggaaaaactggtggagaaaaccagaaaactgaaagaatttcaggacagcgaggacagcgcagaggcaaaagccaaaattccgatgctgaaacgtagtgatatcggaaaagaagcgctgaaaatccataatacaccacaccatgtaacggggaataccgttttgcatcataatctggatactaacggcattacgtatctgacgctgttatttgataccaaacaggtgccggatgaactgatttcttatatggggatcctaaaatctgttctcggatacgtggatacagcccactttacttatggtgaacttttccatgagatcaatgcacagagtggtggaatcggctgcgggttgcaggtattccagggaaaagaccagaaaaatgactgtatacggatgtttggtgtaaaaacaaaatatttggtacaaaaagaagaatttgtattttccatgatccgcgagattctgtttacttccagactggatgatgacaaacgtctgtatgagattctttctcagcagaaagcacgactgcagtcctccctggcggcggcaggacactccaccgcggtgatgcgtgcagcgtcctattattctccggtatccaattttcaggatcggatcgcgggaatcggatatttccgtttggttgaagaactggaaaaacattttgaagagaaaaaagagatactgaaagaaaatctgaagaaactgatgcttttgatcttccgcccggagaatctgtttgtcagtgtgacgacggatgaaaaaggttatcagggtgtggaaggaagagtttccaccctgcgtcatctgctgtatcagactccgatacagacaggaaagatcaattacgatctgcagcaaagaaacgaaggattttctaccgcaggtcaggtacagtatgtagcggtcagtggaaacttcaaagaagccggatatgagtataccggagcacttcgtatcctgaaagtgattttaagttatgattatctgtggatgaatatccgtgtcaaaggtggagcttatggatgtatgagcaacttcagaaaatccggagacagtttcctggtgtcttaccgtgacccgcatctgaaaaatacactgaaaatatttgaaaatacaccggaatatctgcatacattcacggcagatgagagagaaatgacaaaatatatcatcggtacgatcagcgacctggatgtgccgttaaacccatatgccaaaggagaactgtcgcttggggcatggtttgcaggaatcactgaggaagaactgcaggaggagagaaatcagatccttaccgcacagccggaagatattcaggcactgggtgatctggtagaagcagtgttgaaacagaggaacatctgtgtcgttggaagtgaatctgcactggagaaaaaccgtgaaatcttaaaacagatcgaacctctggtacaataaaggagaacatatgaaggaaaattttaaatccggattcgtggcaatcatcggaagaccgaacgtggggaaatccactctgatgaaccatctgatcggacaaaagattgctatcacatccaaaaaaccacagaccaccagaaataaaatccagaccgtgtatacctgtgaagacggacagatcatctttctggatacaccggggatccacaaagccaagaacaaactgggcgaatatatggtaaatgtggcagaacagacactgaaagatgtggatgtgatcctgtggctggtagaaccgactacttatattggtgccggtgaaaagcatattgccgagcagttacagaagacaagtctgccggtcattctggtgatcaacaaagtagatacagtgaaaaaagaagatattttacaggtaatcgataattaccggaaattgtatgattttgcggaaattattccggcatctgccctgcgtgggcagaatacgaaagacatcgtgaacagcctgtttaaatatatgccgtatggtccgatgttttacgacgaagatacggtaaccgatcagccacagagacagattgttgcggagatcatccgtgagaaagcactgcatgcgctggatgaggagatccctcatggtatcgctgtaaccatcgagaagatgcgggagagaaagggtcagcatattgtagatattgaggcaacaattatctgtgaaagagattctcataaaggaatcatcataggaaaacagggttccatgttaaaaaaaatcggaagtaatgcccggtttgaaatcgaaaaaatgctcgaagaaagagtgaatctgaagatctgggtgaaagtgaaaaaagactggagagacagtgatactctgatgaaaaacttcggatataataagaaagagatctgatctgtatgagtgagcctattaccgtcaccggcatggtattagctgccacgccggtaggggattatgataagcgcatggtgatcctgacccgtgagcgtgggaaaatcactgcgtttgccagaggggcaagaaaaagcacaagcccctatcttgctatagcgaacccgtttgtgttcggaagttttcagctttttgagggaagaacggcttatacactttcacaggcaaatatccgggagtattttacagaactggcagcaaagcagccgggagtatattatggcttttattttctggagattgcggattactacggaagagagggaaaccgggagacggatatgcttaatcttctgtatatcacgatgaaagcactgatccgggggcgaatttccaatcgactgatccgagcaattttcgagatgcgtgcgatgatgatcaacggagagtatccgcggctttttgagtgtggaatctgtggaaggacggaggatcttactttcttgtcgctggaggcttccggctgtatctgcagtaactgtcgcaaacaggtaaaagacggaatttcggtttcgacatcggcactgtatgcattgcaatatatggtggcaacaccgatggaaaaaatctatacatttaccctgaaaccggaggtggaacgggaggttacccgctgggtaaaacgttacatagaccgttataccgataaacgatttaaaagtctggagattcttgaagtgatggattcctgaaaaacgcaactataaaaaccttgaaaattaactatccagacggtataataggtctgactatccggtaatggaaagtcagaggagtgattcggaggaaaaaatcatgaaaaaacaaaagctgggactggcactgacagcagtattgctactgaccggctgtggtggaatagaaaaaatgacagaaactacagtgacggtggatgacagcggaacggtagaggaattgttattggaggatttttctgacgagacttataaagaaaaggagctggcagcgcagattaacgaactggtggaagcatataacaaggaagcagggagtgaggctgtatcggtaaaaagtatgcaggtaaaagataagaaagcgaaagtacagctggaatatcagtctgtggccgattaccggggcttcaatcagatagatttttttgcgggcactgtaaaagaagcacaggaagaaggatatacttttgcttctgattttacagatgcagagggaaaagatgtttccagggcaggaatgcctgacggatgtgaaaagcagcaggtgatcattatccgtgagccgatgcaggttctggtgccgggaacgattcagtatgtcagcaagaatatgaaagtggtaaataaaagtcaggcaaggctttcagccgatgaaggtacagacgatgaaagccacgtgactacacaggcatatggttatgtgatatacacggataataattaaaaatttgtgccggcaggatgctatcttgtcgactgccgtgggaattaatacgttaatactagacatatatttatgtctcagggaatataaaggagatcaattatggaaaaaacaatggaaaaaatcgttgcacttgccaaatccagaggattcgtatatccgggttccgaaatatacggcggcctggcaaacacctgggattatggtaatcttggtgtggaactgaagaacaatgtaaaaagagcatggtggaaaaagttcatccaggaaaatccttacaatgtaggtgtggactgtgcaatcctgatgaatccgcagacatgggtagcttccggtcatctgggtggattctctgatccgttgatggactgtaaagaatgccatgagcgtttccgtgcagataagatcatcgaagatttctgtgcagaaaaaggaatcgcactggaagaaagcgtagatgcatggagccaggaaaagatgactgctttcattgaagagcatcaggtaccgtgcccgacctgtggaaaacataactttactgatatccgtcagtttaacctgatgtttaagacttttcagggtgttacggaagatgcaaagaataccgtatatctgagaccggaaacagcacagggtatctttgtaaactttaaaaacgtacagagaacttccagaaagaaactgccgtttggtatcggacagatcggtaaatccttccgtaatgagattacaccgggtaattttactttccgtaccagagagttcgaacagatggaactggaattcttctgcaaaccggatacggatctggaatggttcaattactggaaatctttctgcctgaactggttacatgaactgggactgaaagatgaagaagtacggtatcgcgatcatgaaaaagaagaactgagtttctacagcaaagcaacaactgacgtggaattcctgttcccgttcggctggggtgaactgtggggtattgcagaccgtacggattacgacctgacacagcatcagaatgtatcagggcaggatctgacttactttgatgatgaagagggtaaaaaatatatcccgtatgttatcgagccgtctctgggtgcggatcgtatggtactggcattcctgtgcagcgcatacgatgaagaagtcttggatgctgagaaaaatgatgtgcgtacggtactgcatttccatccggcactggcaccggtaaaagtcggtgtgctgccgttgtccaagaagctgaatgagggcgctgagaaagtttatgcaatgctggcaaaagaatggaactgtgagtttgatgacagaggaaatatcggtaagagataccgtcgtcaggatgagatcggtactccgttctgtgtaacttatgacttcgattctgaaacagatggagcagtaacagtcagagatcgtgacactatggagcaggaaagagtgaagatcgaagatctgagagcttatcttgccaagaagatggagttttaaagtcaaagaagattgattttggaaaaagaaagaaaaaaatagagttgtgaaaaaaagaggaagtaagacaatactgtggaaagtttgtcttacttcctctttttcatagtcaggattggtaaagcttgatttttgaaaacagacagggtcagtaatcaattttgaacacagggtctgcaggatagcctccgccgagtttctggatggcacgctggatgctgtccttggaattgccccagtctttgtcgcggttcaggtagtcctgtttgtcacaaaaccaggtaacttcttcttcaagacgcttcatgttttcttccatcagagaaaaaagaaccggataaaactcctgtttttctttgacagacagttttttttctccgacttccacaaggtcacggaagtgatgcatacagaatcctttgctgcttttgaaaagttctttgaattctttgctgtttttatacatataaaagaaagtatccagataacgctgataggttgcattaaaatggtcacagacatagcagctgtgttctttttcatagagccattgtcctaatggtgtttccggggcatccgggttcaggtctgtctttttcagacgtcccatcagagtagatttgccggaagtaaaggattttatctgtctggtcatctcttcattcagttttttcagatgtgtgctgagcatcagtccacaaccgagacgattgccaaaatcatacatcattttataatggtgacgacagaagccgatccggtcagtctccatgcggatatcatcctccatataagaagactgtttgccaagtatgaattccagagcgtgctgctcggcatcccgttctaatctgcagaaaggacattcatcttctgcatgaaaagcatcgtttagtggaatggtatagattgtttctttcatgtaattccctcgctgtctatatgaaatcgttgttttttcggatggaacatcgaaaactgtgttccctatttctgtgaaagaagatactgcatttctgcgcgtccatacgaagcataaagtaatggttcctgggtgaatactcttgaaacattgcttggacgtccctggatttcaccggaaagtacctgacccaccaggtcgatcatatcagccagaacaccgagacccagtggattataaaccggatgtgcaacagattcgaaggcttgcatatgatgaccgccgaagaacttcatccgtccaccgttgtcaaccagccaatgcatgagatgaatcagactgtcgtaatatgttttaagatccgttgatcctggaatctgcatccagacgccacatccgcttccaatcgcatcgcctgtgaacaggtaattctccctgctttccagaataactatacttcccggtgtgtgtccggggacctgacagatacgaagctctgttccaccaagagaaattacagagtctgtgtgaatatcgtgaatctcatcccagggtttcagtcttccagcagtcagggtgcgcagcgtcgtttcatctatttttttttcgtcgtgacacatataaacttcttcaaactcatccatatggtagatgtgatccaaatgtacatgagttaccacaagaagaagtggtttgtccgtgagttcacggagcagtggcatgattttctttccggtggtaatcccggtatcgatgactgccgctttctcatcaccttctaccatgtagaaagaagaatttcctgcatccagaatacaaaagatatgtttgccgattttagttacttcaaaaccttccatagatgtttcctcctcgatttgtcgtggctcacaaaatatctgataatgttttatggataaataatgtataaacatcttgtataagaataacccgtattatacaaaaggtcaataaggaaacacgtggaaactataataatagtgaatatacataaggaaatattgaaaaaacaataataatttagtataatgacgattatagtattatcgtacaaaatatttataggaggagatgccaatggccagcaaaaaaagaaatgtaatcgtaggacagtccggaggtccgacatctgtaattaattcaagtttggcaggtgtgtataaaaatgcaatcgagagaggatttgacaaagtatatggtatgctgcatggtgttcaggggcttttggatgaacagtatgtagatatgtccacacagatccattccgatctggatattgaactgttaaagagaaccccgtccgcttttttgggatcctgtcgttataaactcccggaaattcatgaaaacatggagatatatgacagaatttttgagattttggacaagctggagattgattcctttatatatatcggaggaaacgactccatggataccatccgtaaactttccgactatgccatcgtaaaaggacataaacagaaatttctcggtgtgccgaaaacaattgataacgatctggctctgacggatcatacacctgggtttggaagtgcggcaaaatacattgcggcttccacaaaagaagtaatccgtgatgcacttgggctgacatacaaaaaagaaatgatcaccgttatggaaatcatgggaagaaatgcaggatggcttacaggagctgcagcgcttgctaaaacagaggaatgtgaaggaccggatctgatctatcttccggagatcgcttttgatgtggaagatttcctggcaaaagtaaaagaactgttgcagaagaagagttctattgtaattgcagtttcagaaggaatcaaactggctgacggacgatatgtgtgcgaactgtccggtggcggagattatgtagacgcattcggacacaaacagttacagggtacagcagcttatcttgccggattcctgggtgcagagatcggatgcaagactcgtagcgtagaattctctacactgcaaagaagtgcttctcatatggcatccagagtagatatcgaagaagcatttatggtaggcggagcagcagtaaaagcggcagacgaaggatacaatggaaatatggtggtaatagaccgtgtatccgatgatccgtacatgtcatctgcgggaatctacgatgtgcaccggatcgccaatgaggaaaaactggtgccgagagaatgggtaaacaaagaaggcaattatgtaacaaaagactttattgactatgtaaaaccgttaattcagggtgattatcagccgattatggtaaatggtctgccacgccatctggtactggatatgaaaaagaaataacgtgccgaaaatcctgaaaaaaacagaaggatttttaaggtatttttccttttttcttcggtttgacttgactataatgtgctttttgattacaattattgtatacgagtgcgaactgcatgagtgaaaatgttttccgcttttcctggtgggagatgtttggaaatttaatatacttttaggaggaatgtttaaatggcaacaaagtgggtttatatgttcactgaaggtaatgctaccatgagaaaccttctgggtggaaaaggtgctaaccttgctgaaatgacaaacttaggactgccggtaccacagggcttcacaattacaacagaagcttgtactcagtactatgaagacggaagaaaaattaatgatgagatcatggctcagatcatggaatctatcacaaaaatggaagagatcaccggaaagaaattcggcgacaaagaaaatcctcttctggtttccgttcgttctggtgcaagagcatccatgcctggtatgatggatactatcctgaacctgggtctgaatgaagaagtagtagaagttctggcagctcattccggaaatcctcgttgggcatgggattgctacagaagatttatccagatgtactctgacgtagttatggaagtaggtaaaaaatacttcgaagagctgatcgacaaaatgaaagctgacagaggcgtaaaacaggacgttgaactgacagcagaagatctgaaagagctggctaatcagttcaaagctgaatacaaagaaaaaatcggagctgaattcccgacagatccgaaggaacagctgatgggcgctatcaaagctgtattccgttcttgggataacccacgtgctaacgtatatcgtcgtgataacgatattccgtattcctggggaacagcagttaacgtacagatgatggcattcggtaacatgggtgatgactgtggtaccggtgtagcattcacacgtgaccctgcaacaggtaacaacggtctgttcggcgaattcctgacaaatgcacagggtgaagacgtagttgccggtgttcgtacacctatgcatatttccgagatggaacagaagttcccggaagcattcaaacagttcaaagaagtttgcaaaactctggaaactcactacagagatatgcaggatatggagtttactgtagaacatggtaaactgtacatgctgcagacacgtaacggtaagagaacagctcaggctgctctgaagatcgcttgtgatctggtagatgaaggaatgagaacagaagaagaagcagtagcaatgatcgatcctcgtaacctggatactctgcttcatccgcagttcgatgcagctgctctgaaagctgctactccaatggcaaaagctttgggagcttcaccgggagctgcttgtggtaaaatcgtattcacagctgatgacgctgtagaatgggctgcaagaggagaaaaagttgttctggtacgtctggagacatctccggaagatatcaccggtatgaaatctgcacagggtatcctgacagttcgtggtggtatgacatctcatgcagcagtagttgcccgtggtatgggaacctgttgtgtatccggttgtggagatatcacaatggacgaagaaaacaagagatttacactggctggaaaagaataccatgaaggagatgcaatctctctggatggttccacaggtaatatctatgatggtatcatcccgactgtagacgctacaatcgcaggtgaattcggaagaatcatgggatgggctgataaatacagaactatgaaagttcgtacaaacgcagatactccggcagatgctaaaaaagctcgtgagctgggcgcagaaggtattggtctttgccgtacagagcatatgttcttcgaaggcaacagaatcgatgcattccgtgaaatgatctgtgctgaaacagtagaagaaagagaaacagctctggctaagatccttccggaacagcagggagacttcgaaaaactgtatgaagctctggaaggtaacccggttactatccgtttcctggatccgccgcttcatgagttcgttcctactgaagaagaagatatcaagaaactggctgatgctcagggtaaaactgttgagcagatcaaagctatcatcgattctctgcatgagttcaacccgatgatgggtcatcgtggatgccgtctggctgtaacttatccggaaatcgctaagatgcagacaagcgcagttatccgtgcagctatcaacgttaagaaagctcatccggactggaatgtaaaaccggaaatcatgattccgctggtaggcgatatcaaagagctgaaatatgttaagaaatttgttgttgagacagcagatgcagaaatcgcagcagctggcagtgacctgacatatgaagttggtaccatgatcgagatcccgagagcagctctgactgcagacgagatcgctaaagaagctgacttcttctgcttcggtacaaatgacctgacacagatgacatacggcttctcccgtgatgatgctggtaaattcctggatgcttactatgatgctaagatcttcgaaaacgatccatttgcaaaactggatcaggtaggtgttggaaaactgatggatatggctctgaaattaggaaaaccggttaatccaagcctgcatgtaggtatctgtggagaacacggtggagatccaagttctgtagaattctgcaacaaactgggtctggactatgtttcctgctcaccgttccgtgtaccgatcgcaagactggcagcagcacaggcagcaatcaatcagaaataatttaaatttatataaaagcatgtgaaaacatgaattgtgtccaaacgtaaagattgaccccgagggtctgaagtgattcagaccacggggtcttttttgatttacgcgagcagtgagagaaatctcatatatgtagatttggcgggcactgcgataatcaaaatcgatccactggatcaattattaatatgtaatgcgacgagtaaaattcacaaagcgtatgtcatctcgtttacagaaaacattcggtgacaatgtggcaagagatacttttgttctgtgaatatacgcatagggttgaaaaaataataacaagaaaaacaaagatatacaataaaaaatatgtaaaatgatgacaaaatacaaatgaaaaaagaaagagtattgtgtaaaataaataaaaatacaaagagaatctattgaaaaatataagaatatatgataatatgatgataaattgggaagaaggtcgatttatgaaaataaaggcgatttacaggggtggaaagaacctttatttgtaaaaaaatataaagctatttgggcaatcgttaccggatgaggcggtaatttgcaaaaatatattttatgggggtggagcttatggatagttccgttatttggtacgcagtgttagctgtcgtagtagttgctctcgtttttgtcctttttaatttcaacaaagtaaagaaaatgaaagagggaaacgacgagatggtagagatggccggtatcattcggagtggtgcgggtacatttttgaaagcagagtttaaggtgatcgcaatcataggagtcattattgctctggtatttagtctgtttgtggaagccacaagtggaatcacatttctgctaggcgggctgatgagcagtctggtctgtatcattggtatgaagagtgccacctatgccaatgtacgtacagcaaacaaggcaagagaatcactttctatcggagagaccgtaaaagtagcattgagcggtggaagtgtcagtggcattgctgtacaggcatttggtatgctgggactgttgctggtgctgatcatctggggtgtggatcctcacgcaacaggtcacggactggtggcaaacctggagtgcaatccttccatcatgagaatcactacatactctctgggatgttcaatcgtagccatgttcaacagggttgcaggtggtaactacacgaaggcggcagatatttcatctgatattcttgccaagattcgccatgatatgccggaggatgacagtcgtgtgccaaatgttattgcagactttatcggagataatgtcaatgatatcgcaggtaactgttcagatcttctggagagcttcgttgcaaccatcgcagcttctattatgattgcagttaccttatttatcaatggaatcgtgaatgtatctgatgaaacctttatccgtatgattattttcccggtgattcttgccggtgtcggtctgattggatgtctgatcggcctgagttacgcatttatacggaagatgggagatgatccgtcaagagaactgaatcttgccacctggatttcagcaggaattacggttatcctgggtctggctgcttcgtatatgatgtttggaaatgttccgttatatgaagatatggtctgtggatggatatctccgtggatttcaagtatcctcggtatcgtcagcggaattgcgatcggaagtattacagaatattataccagtgacaaatacaagccgacgaaaaaactggcagagatggcaatcgagggcgaggctttcgttatcacaaaaggtgatgcgatcggatcccgttccaccttactgcctatcctcatcatcggtattgccctgtttatctccggaaaaatcagcggaacttatggaatagcaatttctgcactgggtatgctttctttcgtaggcgcaacggtatccatcgatgctttcggaccaatcgcagacaatgcaggtggtctggcagaatcctgtcatctggaacacaaagtccgtatcatcacggacaagctggattcggtaggcaatacaacagcagcgatcggaaaagggtttgctattggttcagctgcatttgcagctgtatccctgattgtggcttatgtaggaaactatacagcaaaaggagaagagccggtattaaatattgcatcattcattgtggttgccggtggcctgatcggtggtgcactgatcgagtatttctctgcgatgctcactgataacactatcgagtcagccaaactgatggccgatgagggtgataagatgctttccactcccggtgtattggaaggaaaagtaaaaccggattataataaactgatcggtatggctgcaaaccaggctttgaaaaaaatggtagtaccgtctgtactggcactttgtatcccggtaatcggcggatttgtctttggggtacagtttgtaggcggtatcctgatcggtgccacaatcgtggcgattccgcgtgcactgtttatgggtaactccggtggagctttcgataatgcgaaaaaatacattgaaagtgaagctcttgaagggcacgggaaaggatcggctgctcacaaagcagcagttaccggtgacactgttggtgatacaagaaaagacgttgtcggtgtggcattggatatttttattaagagtatgtctacagttgccaatacactggcatctctgttttcaacaattacattaattcattaacaagtgaaaaaagaaaaacttctgttggcgaatgcactgacagaagtttttctttttttcgtacttagtatctgaaagcagctttcggaggcaggctctgcagacacctgaaacaataatacgtacaaacgttcgaaaaagatttacaccgaacatatattcgtgtataatgaaagaaatgatggaggtgaaagaaatggaattgagacaagggctgtcgatacaggaaaaactgcggattctggcagatgcggcaaagtatgatgttgcgtgtacgtcaagtggtgtggacagaaagggtatgaaaggatctctgggcaattcaaaagcttgtggaatctgccacagtttctcagcggatggcagatgtatctcgctattaaaggtgctgctgacgaatcattgtgtttatgactgcaaatactgtgcaaacagggtatcgaacgatacagagcgtactgcatttacaccccgggaactgtgtgagctgacagtggaattctataaaagaaactatatcgaagggctgtttctcagttcaggagtgcaaaagaatcctgcatatacgatggaaaagatgtgtgaggcgctgcagcttctccgtactgaatatcatttcaacggatatattcatgtaaaagcagttccgggggcaccggacgacttgatcatgcgtgccggttatctggcagatcgtatgagtatcaacctggaactgccgacagcagagggaatgaaaaaacttgcccctaacaagtctcatcagacaatattaaagccgatggcgaaggtgacggatacgattgctgcgaaccgactggcacaggggaaaagtgcgtatctggaacggagcacatctaatcggtatctgacggacagtattttttcggaagagcagaggaaaattacgggaaatcaaacggatcggatcggagagtcttccgtttaccggattacaacaaaagaacatgaaaaattgaaaaaccgaccctttgcgtctgcaggacagagtacacagatgatcattggggcaacaccagagacagattaccatctgctttgcacgacgcagaacctgtatcagaagtatgatcttaaaagagtatttttctctgcttatgtgcctgtgaacgaagacccggatctcccggggattgatgaaaaaccaccccttttaagggaacaccgtctctatcaggcagactggctgctacggttttatggattccatgcggaggaattattgtcagaacagagaccgaattttaacgagcagattgatccaaagtgtgagtgggcactccggcatctggaactttttccggtggagatcaatactgcatcttatgagcggatcctgcggattccgggtgtgggaccaaaatcagcgggcaggatcgtgcgcgcaaggagatacggaagtctggactttgaccatctgaaaaagatgggtgtcgttttaaaaagagcgcattattttatcacctgtaacggaaagatgatgtacaggattccgatggaagaggattttatcaccaaacagctgaccagtgtagaatataaagaaaactggcagctgatgaatcagcaggagtatcatcagatgtcattgttcggagattttggtgtgcaagcctgagaagaaagggaacggaaatgtattgttttacctgtaaagaagattttgagagtatgatgacctgtatctaccgggtatgggaggcaaaaaaaggaagtcagaacgtcaggttggaaatcgaaccggtggaacagatggaccttctgacggaatatgttcatgtggaggtggatccggagctggcacacaaggtggttcgatcaattcggaccaaaatatctgcaaaagcctattatcaggtctatctggcggctatgagcaatgatcaggggcggctggatgatatttatcgttttctgaggataggatttgctgtgggagggaaagtaaccgagtgtctgagagaagaatcagtgatgcagatctttgaactgagtcgacaggtatcgaatgaaagacattttttccgagaatttttacggtttacgagaatcgaaccggggatttatgtcgcgcatatggagccaaagggaaatgtggtggcactggtagcaggacattttgcagaccggatgccatcggaagactggatgatcattgatgataggcgaggcctgggggtgatccatccgaaaaatgagccgttttatgttacaaagttccgggaagaagagatggagcggctttgtcagacggaacagcaggaagatctttatacgcagatgtggaaagaatttttctgcacgattgcagtggagaaaagggagaatccgggttgccagagaaatatgtttccgttacgatacagaaaacatgtgacggagtttttataaaaagagaagaaggaatacaaaggttattaacggtgttgtttgaaaaacagacagaaaactggtatgataaaaagaaaagagcagaatcgtatattgtgagcaacagaaagtaaaagtataaggcaaaacaggaaacagaatgcagaatggagacggacgaatgaagatattgatattatcctgcaataccggggagggacacaattctgccggctgggcggtgaaagaatatctggaactgcagggacatcaggtagtgatggaagatatgatgcttctgaaaggagcgcggacatcgaaagctgtgggcggagcctatgtgggaatcgtgaagcattttccgttgttatttggtctgggttaccggttgggaggctgggtttcttcagataagagaaagtcaccggtatattatgcctgcagtcttctggcggggacattaaagggctatctggaacagaagcggtttgatgctgttgtaactccgcatctgtaccccgcagagactttgacggcaatgaagaaaaaagggtggctgaagattccggtggttgcgatcggaacagattatacctgtattcctttctgggaggaaactgactgcgagtattatgtgattccccatgaagatctgatcgaagagtttgtaaaacggggtattccgagagaaaaacttcttccgtggggaattccggtacgccagagctttatgaaacaatggaataagaaggaagcaagaaaaatttgtcatattccacagaataacaaaagttatctggtgatgggcggcagtatgggatttggaaagatccagatctttgtgctggaacttgcctgcaggatggaagcagatgaggacatggtggtcatctgtggaaataataaaaagctggaaacgcttttaaaacgggaactggttcatcgaaagaatgtgagagtcctcgggtatacggatcaggtggcggcttacatggcagcctgtgatgtgattttcacgaaacccgggggactcagcagcacggaagcagctgtgatggggattccgatggtacatacgaatccgattccaggatgtgagacgaaaaatgtggaattcttccagaaacatggcatgtccatcggaaaacgttcgtttgtcggacaggtgcgcacgggagaaaaacttctggagcgggaaaaactgcgtgcgcagatgcaggaagcacagaaaaagaacagcaggccggaggcggcagaacgtatctgtaagctgctggaagaactgaccggcaataaagaaaacagaattatagatttagaaattattcagtgaatagtaatacggaaacattttaatttatgatctgaaaaaacggaattgttatatagtttatataagatagcagaaatgcagaggatgaaacgaaatacttccggttgaaagcaatccaaaagtacagaaagaagcagggtgatgagagatgattacatggcaggagtggggttatatcataggcgggtatctgtcaggcagtgtcctgtacagctatctgctgccaaaagcactgaaaggaattgacattacagcggaaagcccggatggaaacccgggaacggcgaatgcttttacctgtgcgggcataccgatcgggattctggtgctgtgcatggaactgctgaaaggttatcttccggtgcatctggcgttgcgggaggtgaatccggcacgatggagctttgcgctgattctggcagctccggttttcggacatgcctgcccgttctttcagccacagaaaggtggaaaggccattgcagtatccttcggggttctgcttggactggtaccgttctggcttccggtactgtcactggcagctttgtatctgatcttttccctggtgatcgtgatcgagccacacttttaccgttcaatctgcacatttgtgttgttttcggttaatgttttctgccgtgtggcgatgacgggtatcggtgttggctgctgtctgatttcagcagtggttattcgaaaacattacgacagatatcggggagaacagatgaaagtgcgtctgccacttcatcggtaaccaggtgttactgtgcacggagtgaacaaaacgttactgtttgctgaagggctggaattataaaaagagggttgacagaaagaaaaataaatgctatttttgaagtaacttatatgactgacggaagtggagtttaccacggggagtataagggtttgaagccgaccgtctgggcagtgtagctcggattgtaggcttttttcattttcagcataatttctgcgtagtatggagaaaacgggaaaagccgggtatagtgattttcgttatgaagattcgctataccgatccggatcatggtaaaatcaaaacataagacaaaaggagaattgttcatgaagatgatatcattggaacaggaactgagaggaaattcatacccgggaagaggaattgtaattggcagatctgtagacggaacgaaagcagttgcggcctatttcatcatgggaagaagtgaaaacagcagaaaccgtgtctttgtagaagaaggacagggaatccgtacccaggcctttgatccttccaaactggtggatcccagtcttattatctatgcgccggtacgtgtgttgggcaataaaaccatcgtaaccaacggagaccagacagatactatttatgagggaatggacagacagctgacatttgagcaggctctgacatccagggaatttgaaccggatgcaccaaattacactcctcgaatctccggagtgatgcatattgaaaacggagcgtttgattatgcaatgtctatcttaaaaagcaataatggcaatccggactcctgtaaccgttatacattctcttatggaacagcacttgcaggggaaggacattttattcatacatatatgggcgatggcaatccgctgcctagttttgaaggagaaccaaagcttgtggcaattccggatgagattgatgaatttaccggtctgttatgggaaagcctgaatgaagaaaataaagtatctctgtttgtacgttatatcaatattgcagacggtacctgcgagacaagaattgtaaataaaaataaataagagagggagaagtacaatgaaagaattacagttaaagtatggatgtaacccgaatcagaaaccttccagaatctatatgaatgacggatcggaacttccgatcaaagtgctttccggaaaacctggatacattaactttctggatgcttttaatggctggcagctggtatccaatctgaaacaggcaaccggtctggcggcagcaacctcttttaaacatgtatccccggcaggggctgccgtgggacttccgttaagtgagacactggcaaaaatctactgggtagatgatatggactggaaaaacttctctccgattgcctgtgcttacgcaagagcaagaggtgcagaccgtatgtcttctttcggtgattttatttctctgtctgacgtatgcgacaaagataccgccctgctgatcaagagagaggtatctgacggtgtaattgcaccgggttatacaccggaagctctggagattctgtctcagaagaaaaaaggaaattataatgtgattcagattgatccggattatgtaccggctccattggaacataaagaagtgtttggtgttacttttgaacagggaagacaggaactggcaattgatgatgaactgatttccaatctggtgacaaataacaaagaactgaccgaagaggcaaagagagatatgaagatttctctgatcatcctcaaatacacccagtctaactctgtatgtttcgtaaaagacggacaggccatcggtgtaggcgccggacagcagtcccgtgtacactgtacccgtctggccggacagaaagcagacaactggtggctgcgccagagtccacaggtactgaatctgccgtttaaagagggtattacccgtgcagaacgtgataacgcgattgatgtttatatgggtgaggaatacatggatgtgatcggtgatggaaactgggagagatcgttcactgaaaaacctgcagtattcacaagagaagagaagcgtgcatggctggatcagctgacaggtgttacgctgggatctgatgcgtttttcccgtttgcagataatattgaacgtgcacataaaagtggtgttgcttatattgctcagcctggaggatctgtccgcgatgatctcgtgattgagtgctgtgataagtacaatatggtaatggcattcaccggtatccgtctgttccatcattaaaaacaggagtaactgctgataagtagtaactgtgagagtgtggaaaagttacgctaagtaaagtaataaaacgaaaaaccgatgatttctgatttgtattttctgaaaaaaacaaaatcagaaatcgtcggttcttttttgtatatattctatttcttctttcataaaactaaatactgctatttctcaatcttttcttttaaagctgttttgaaggcgtcgtctgcctgattggtatcaatcagtgactgaatataattcaaaataccgccttttgttgtcgggctgtctactacacactgaatcagttttttctgttcgttgtatgcatgctgatctatgagtggtgcataggctctcccggtgcgtgtcatggacttaccgatggaatctactttcagatatcctttttttgtcagtgtgataataccgggtgcaacagtatttcttttcaatgttacatcttttttcagaatctcagatatcagacaggggtgaccgatttgccatacagcctgcataatctgttcttccttgcgggttagtgtctgcataaaagctcctttcatataaataaacaagtatcagtaataatactatttttattataagctatctatagaaaaaatcaacgagtatgtatggaaaacattaaaatgaaactattttcacgttgctgctctgtgaattgtctgaaaatctttgatgggagcagaaaagaaccgatactaccaacattctatacaaaaaacaataatttatacgtgatttggaaaggataataaaattattttttggatataatagacaaaaaacgaggaaaaatattgtacaaaatattggtgtttttgtaaacgtgttgcaaaaccagacaaaactaactagaattcataacggtttataggataaataaggaaaggaattatggaaaatgaaaagacgtggaaaagcagcactttgtcttggaatgaccggcgtgatggcagttggaacaatgctttccggatgtggaaaagaacaaacaaacggaaaagttaaaattgaagttgttcagtacaaaccggaagccgtagatgtatttgaagagctggaaaagaaattcaatgagacgcacgacaatattgaactggttatcgattctccgaacgatgccatgactattttaaaaacaagatttattcgtgaggattatccggatatcatcggaatcggcagtgatgtaaactactctaatttccttgattctgatatgttaatggatatttcggattttgacgggctcgatgatattaaagaagcgtatcttaagacagataaagaaatggaatatgtgccgatggacggagtttatgcaatgccgtacatggccaatgcgtccggtgtcctttacaacaaggatatgtttgaagaacatggctggacgattccaaccacatgggatgaatttactgctttgtgtgaaagaatcgaagctgaagggattcagccgctgtattttggattcaaagattcctggacctgtctggctccgtggaatgcgatcgctgcagatctggctccgtctgatgtgtgttcggaggtaaataaagggaataccacatttaccgataattacagagaagtggcagagaaagaaaaagcgcttctggcatatgcccaggataatccggcagcatacggatacaacgatgcgtgtacagcatttgccaaaggtgagtctgcgatgtttgtgatcggaagttatgccgttcctcagatcaaatcagtgaatccggatatgaacattgattcctttgtatttccggcaagcaacaatgcagaagaaaatgtgttaaactccggtaacgacttacagttttccattatgaaaaactgcgaacacaaagaagaagcatatgaagtactgcgtttctttatggaagatgaaaatgtacagtcatacattgatgatcagagtgccgtgccatgtaaaaaaggcgatttcgaactgccgtctatgctggatggtatgaaagaatacatcaacgaaggaaaactggcggactatcaggatcatcattatcccagtgaaatgtccgtagatgcgatgattcagacatatctgttggatgacagcgaaaatgctaccgacaaattcctgaagaaatttgatactgagtgggttcgttacaaccgtgatctgattcggaaagtacaggattacgaaaaagaaaacggaagtaacaactaggaaaggggataagaacgatgaataagaaagggaaaatcaacgacagagagcgcacgtttctcctgattaccattccggtactggtgctgtttttctgctttaacacattaccgctgatcaaaggttttatctatagttttacaaacttcaaaggatatggaacctatgattttgtcggacttcgaaactacaaagatctgtttaccgacgcccgcgtgggaagatcttacctgtttacttttaaatatgcaatcgtttgtacgatcattgtaaatgtcatcagtctgcttctggcactgggactgaatgcgaaaattaaaggaaaaacggtgctgagaggaatctatttcatcccgaatattcttggtggacttgttatcggttatatttttagtttcttctttacttatattcttccggcagctggtcaggcagcaggaatcgaatggctgagttccagtattctggcaaaagaaagtactgcatggtttggtatcgttattgtaggtgcatggcaggcaattgcaatgaataccatcatctatatttccggtctgcagaccgtgccggaagatgtgtatgaagccggtgcaatcgatggagccaccggatggagaaggttcaaagaccttacatttccgctgattattccattctttacgattaatatggtgctgtgtatgaaaaacttcctgatggtatttgaccagattatggcattgaccaaaggtggtccgtcccagagtacagagtccatctcttacctgatctaccagaatggtatgagtggtggacagtttggtttccagagtgccaacgcggttcttttctttgtcgttatcgtggcaatctctgcattccagatgacagtaatgggtaagaaggaggaacagttataatgagtaagaaaacaaataatcagacagcaaaagtcaactggccgattaccattttactgatcatcggctgtctcaccgtgttttttcctctgtatatggcagtgatcattgcgttcaaacagccgtctgagatgacaaatgatatcgccggagcactggcatttccgaaaacctggagttttgcgaacttttcggaagcgatgaaggtaactgatttctggcattctctggggaacagtttactgcttacgatcgtgaccgtgatccttgctattctgatccattctctggcagggtatgcgattggaagaagtatggcaaataaaaagttttataattttgcgtatctgtatattgtaagtggtatgttcgtaccgtttgcgattctgatgatgcctctggtaaaacagactgcgcagatcggaattgccaatcgttttggtgttatcgtactgtatgtggtattctttatgccaatgaatatcctgttatattccggttatctgaaaaatattccactggcactggaagaagcagcacgtgtggatggcgctactacatggagtacttactggaatattattttcccgatcatgaagccaatgcatgcaaccgttgctgtactgactgctatgagtacctggaacgatgttatgacacctctggttatcatgtccggaacaggaaaaaatacgttaccactggcgcagttaaacttccagactcagttcggaactaattataacctggcattcgcctcttatctgctggcactgctgccgattttgatcttctatctgatctgtcagaaacagattatcaacggcgtggtaaacggagcagtaaaataatagttactgttcactggtaatatcccgcgaggcgttttttgtgagcgaaggtcacagaaaactcgagacatatcgcgcgaatttatgcgattagcataaattctgtgcatcgcgcagcgtgttgctgggcacggagtgaacagtaacaaataatataaaatatctataaaatcagggcatcggctttcacgtcggtgtcctttttgttataataaattataaaacaacatttctccgtataccggcatatagtaaaagaagaaaagaaatacgggcggaaaaatatggcatataagattgtagtggacagtggacacggaggagaagatccgggtgcagtctatccgggcaggcaggaaaaggaagatacgttacggcttgcactggaagtagggagacttctggaggcaggaggacaggatgtggtgtatacaagaaccacggatgtctaccagacaccctttgaaaaagcgcagattgcaaatcgggaagaagcggattattttatttcgattcacagaaattccagtccaagacagaatcagtatcagggggtagagacactgatctatgacaagtcgggaatcaaactgaagatggcagaggcaattaacggggctctggaggaggtgggattccgtaatctcggggtgaaagaacgaccgggacttgtagtgttgcgaagaacaaatatgccggcacttctggtggaggcaggatttattaacaacgatcgggataatcagctgtttgatgaaaaatttacagaaatcgcaggagcaatttctgaggcgattctcggtacactggatcaggaaactgtggaagatccacttttatatcgggtgcaggtgggagttttcagaaataaagaaaatgcagaccggctgaattatgaacttttggataagggatatccatcttatattttacagcaggacggatattataaagtccaggtgggagcttttgaacagcttgggaatgctgttttgatggaacaaaggcttcgaaaggatgggtatcagactctgatcacaacccgctagaagacaggatgaagaagggagcagatccatgggaatacaaaagaaagacagagaatatgaacgttttttagatcagatcagtgatttcatttttgtggaggataaaccggagagggcagatatcatttttgtaccgggtaatggatttccacagatgtccatagaagcggccagactgtggaaagagggaatggcaccctggatactgccttccggaaaatacagtatcggaaaaggtgcatttacaggggtacaggccatgaaggaaaaatatcagggaccgtatcagacggaatgggaatttatgaaagatgtgctgctaaaagaaggcgtgccggaagaagtgatcctgcgggaagacggggctacatttacctatcagaatgcgatcaactccagaaaagtgacagatgcagtgggtattcgggtgaaaaaggcaattatctgctgcaaagcccagcatgccagaagatgcaagctgtattatcagtacttatacccacagacaacctttctcatttgcccttcggatgtgggaatcaaccgggaaaactggtttgatacgcaaaaaggcagaaaggaagtactgggagaagtagaaaaatgtggggaacagctgcaacggatcttttgcagggaagcggattcatggagtatctgagagattcggataaacagacgatacgaacaggatgttatcatttcatacggaaagcaggagggtgttatggcagcatatgtggaaatggatcaggttacaaaaacctatcagatgggagaagtgacgatcaaagctgcggatggtatttcttttcaggtagaaaagggagaatttgtggtcgtggtcggaccaagtggagcaggaaaaacaacggtgctaaatattctcggcggcatggatactgcaacgactggaaaagtatccgtggacggaacacgggtggataagctgaaagggaaaaagttgatccagtatcggagagaggatattggtttcgtgtttcagttttataacctgatgcaaaacctgactgcactggagaatgtggagctggcacttcagatctgtaaagatccgctggatgcaaagacagttcttgaagaagtggggcttggggaacggatgtataatttcccggcacagctttcaggtggggaacagcagagggtggcgatagccagagctctggcaaaaaatccaaagttactgctctgcgatgaaccgacgggtgcgctggactatgtgaccggaaaatcgatactgaagttattacaggatacctgtcataaaaagggaatgactgtgatcgtgatcacacataactctgcactgacacctatggcggatcggatcgtccggatacgaaacggcagggtggcagaggtgatacaaaacgagaatccaacaccggtggaagagatagaatggtaggtggagaggatgaaagcatttcggaaagattttttcagagagattttaaagaataaaggacggtttttatctgtttttttcatctccctgctgggtgcggcgttcttttcggggattcggtcagcagaaggagatatgaaaacttcagcggatgcttattacgatcagacaaattatatggatctgcgggtgctgggaacgctcggtcttacagacacggatatggaagatatcgcaaaggtgaaaggcgtagcacaggtaaccggcgggcatacgttagaagtattacataaagaaggggaaaaagaacagacagtgaagctgatcgcgttagaagatggcgtaaatgaaccacagattctggatgggcggctgccgcagaaaacggatgaaattctggtggaccagaaattcctggatgaaaccggaaaaaagatcggcgatcaggtgatatttgagagtggtacggacactgcactttcggatgaccttgttcatggaacgtttacgattgtgggatcggcaacgttaccctattatatggaactgacccgtggaacgggaagtataggaaacggcagtattgacagttttgggttgttacttccggagacgtttaccagtgagatttatacagaaatctatgtgcaggtggatggggcaaaggagctggaaagttacagtacctcttacgaaaagactgtaaaacaggtacaaaaccgggtagaagagctggaagaggaagcatgtcagaggagatatgatacggtttatcaggagggggaagacaagctttccgatgccagaaaacaggtaacagacggtgaaaaggaactggcggatggaaaaaagaagctggaagacggtactttgcagatcgaagaggcaaaagataccgtcgctgaaaaggaaaaagaactgaaggaaaatgaatcccttctggcagaaaaagagacagaattgcaaaatggggagaatcagctttctgcaaaggagaaagaactgactgccggagaacaacagctgcagcagaaaatgcaggaacttgcagccggaaaacaggagcttgccacaaagcagacagaactgacggatggaaaggcacagctgcagatacaggaagaagagctgaatacagccaaaagtcagcttgaggagcaggcggcgaaactggaagaacagaaaagtcagctggaagaaaaagaaaaggagctggatgaaaatgaggtgacagtaactgcgggtatcacacaggtacaggaagggcaggaacagcttgccgccggtatgcaaagtgtacaggaagaaatcacccgactggaagccaagaaagaacaactctcgcagatggaagaaccggatgcggaacagctgcagcagatcgagactgctttgcaggagttaaagcagcagcttaccggactggaaacacaaaaggaagtgctgtcacagaaagagacggaactgaccgggaatcttacacagatccagttgggcaaaggggaactcgagcaggcaaggacgcagctggatgccggagaagcggaaatcagtatgcatcgtcaggaacttgcggcgggcgaggagaaaatcgcacaggcaaaggaacagcttgcagcaggagaaagacagatcagtcaggtacaaaaacagctcgcggatggtgaggcgcagattgggcaggcaaaagcacagattgcggacggaaagaagcagcttgccggagcaaaagctgcacttgcagatggaaagacgcagctttctgccggaaaacagcagattgtggatggaaaaagcgcactccgggaggcgaaagatgagattgacgcgaaagagacggaactggaggacggctggaaggaatacagaaaagaaagccggaaagcagagaaaaaactggcagatgcaaaagaagaaattgcagacggagagaaaaaactggaagatctgaaggttccggactggtatgtatggggacgagatcaggtgacttccacggaaaattacggacaggatgcagtgcgcatcacaaatataggaaagttctttccggtcattttctttctggtggcagcgcttgtcagcctgacgacgatgactcgaatgatcgaggaacagcgtcagcagatcggtacactgaaagctctgggatacggagacggtgtgatcgcggtaaaatatcttgcctacggactgatgtttaccatctccggtgcatttgtcggagtgctgctcggtgagaaaattctgccgtgggtgatcatgaatgcgtatggtatgctgtatacgggtatgaaagagtatctgaccccgttaaactgggaagagggcggacttgcgatccttgcgagtgcactctgtaccggtgtggcaactgtagtggcatgttataaggaactggcagcgcgcccggcacagctgatgcgcccggaggctccaaaaaacggaaagaggattctgctggaacggattccatttttatggaaacatctgaactttacaacaaaatcaacgatccggaatctgatccgatataaaaagcggttctttatgactgtcattggtatcggtggatgtatgggactgatcgtggtgggatttggcttgcaggattcgattactgcgattgcaaagaatcagtttgtcaatctgtttacctatcaggcaagcgctgtttttaacggggacgccacggaagagaaaaaggcacaggtacaaagcgagatggagacgtatccggggatacagcagattctggagatgtattgccagagtgtggaactgcagtcaccgaagcgcagtgtggatgcggtgatggaagtaccgaaagatctgacttgttttggagatttctttgatctgcgtgatcgcatcagtggaaaacattatgatttcccggcgcagggggctgccatcagtgagaagacggcagatattctgggactcaaagtcggtgatacagtgcagatgaaaaagggtgatcagattgtgaaagtcgaaatcacggagattgttgaaaattatgtgcggcattttatctatataacgacagatacatatcagaccttgttcggggaagcggcagagtataatcagctgttgcttcgctacgaagatacgtcagacagttacgaggacggactgggacagacgatcatggaacatccggagatcgcagctatctcctttacgtcagatctgatcagtgagatcgacaacatgcttcgctctctgaatatcgtcattgtggttctgatcgtatcggcaggtttgttggcatttgtggtgctgtataatctgaacaatatcaatatcacagaacgtcagagagagctggcaacactgaaagtgcttggattctacgacggagaagtggcttcgtatgtatatcgtgagaatatggtgcttacggtattcggaatcctcgcaggtgtgggaatcggtgcttttctgcatggaaaggtgatccgaaccgtagaagtggatatgatgatgttcggaagaagtatatttttcagaagtttcttgtacagcggactgatcacactggcatttgcattgttagtcaatggaatgatgtattaccggctgaaaaagattgatatgatcgaatcactgaaaagtgtggaataaaaaagaagaagaggttaatcctcttcttcttttttatcgtaaaaatcttccggtatatagatgtgtacaagttcgatacggtttttgtccacctgatcaacgaccagtttcagatgattatctgtgatacaggattcaccgggaaccggcaggtgatcgagctgttcgatcacaaaacctccgatagaatcgtaatcttccgtttccagatgcagatccagagcttcattcagatcgtccagtttggcagaaccttttgcgagatattctcgtttcggaacgatttctttaaagtcttcctcttcgtcggcatcgtattcatcacggatctctccgacgatttcctcgagcaggtcttccagtgtgatcataccggcggttgcgccatattcatcaaggactattgccagattgacggcatattctttcatctccatcagaagatctgccgtacctttatattcataggtaaaatatgggtttctgagaaaatcccgtacagaaaacgttttttccggatcacgcagaatcaggtctttcatattcagagtgccgatgatggtatctgttgaattttcatagaccggataacgtgtataaccgtcttcacggaatgcctgaattacttcgtcataagtggcatccacattaatcagagacatatcgatacggggaaccatcacatccttggcctgagaatcaccaaaatcgaaaacgttatagatcatctgccgttcttcgctctcgatgacaccgtcttcatgactgacatccacgatggtacgaagttcctgctctgtcatggcatttggcttggcatcgggatctacatgaagcagaaataagacacctcgcgaaagcagattcacaaagaaaattacaggagtcagcagtctggtcaaaggatagattatcggtgcataggcaagagagattttttctgcctgtaatgttgccagggttttcggagtaatctcaccaaacagaagaatcagcaaggttagaacgccggtgataaaaccaataaaggcattaccaagaactcttgtggtccaggtggttgccagagaagatgccgacaggttgacaatattattgccgatcaggatcgtactcagaagctttcccggattttcaataattttcaataaggtttttgcctttttattcccatcgtcagcaaaagacatgatacggatcttgttgaccgtagtcatggccgtctctgcggaagagaaaaatgcggaaagcaaaattaacagcagtaacacaattagttgtatggcgtcgccagaatccaaaaatattcactcctttgaaaatatgtagtagttgtacttgaatatacaggaattcgattcaaaaatcaagacaaattcttgtaaaatcatattttttggggtgttgaaaaagaaaaggatatgttataatataaaactgaataactgtgaaagtagtaaaaaaagctgtgaaaccgcagctgagaatacaaagcaggagagatgtggataatgaagaaaaataataaaccggcagcgaagcgatacatgaagacggtgggaatggtgatggcatccgtgatggttctttcctccacaaccggtcagatggtatatgcggagtctgcaaaagaccagaaagatactcaggatggggaaaagaaagaagaaaaaaccatcgtatatctgaatggaaaaacgggaaatgataagaatagcggcgagagccaggatgaggcagtgaaaagttttgaaaaggcagcagaacttgcaggatctagcggtgtgatccgaatctgtggtacagttactgtagatgaggaagaaacctgggaattaccatccggagtttctatccgccgcgcagaagattttgaagatgcactggttcgcgtgaccggctgtctgaagctggataatgtccgcctgtatacagaggatatcaccggcgatggtgaagtagaaggagcagcagaaaaagaaaaagtttatgttccgaaagtaattacggtaaaagatacaaaagcactgtcagagatttccctggaaggctgcgatggagacggagtattttcctgggaaaaagaggatgcagttccaacagaatacgagacagactatcaggtggttttccatccctatgacacgaaaaagattgattacagcaaggaaaaaggatgggacgaagacagcgaaactgtgaccagaaaggttactgttcgcgtaagttctctgaaaccggaagtcacaccaacgccggaagcaaccgatacaccggaagtcacaccgactccggaagcaacacctgaggttacagtgacaccggaaccgacaacaacaccggaagtcacaccacagccagagagcacaccgcagccaacacctgaggttacggaaccgacagatcctggttcagaagtgacacatccggacacaacgattaccccggacccaacagaagtgccggatgttccgacggaaccggaagtaccgccaacggatccggcagaaccaacgcctgaaacaccaaaaccacagccggaggtaccgtctgataccgtaccagagacaccggcagatacagaaagcgcagaaggatccggacttacctgggagcagatgaatgagattgcaacggtacaggaacagctggatttccttccaagcgaagtgacgacaacggaagaggtagaagcaatcgtagcggctacaaaagaatacgagacactgtctgaagcacagaaagcttatatagaggctgacagtctggtactgttacagacagcccaggaacaggcgaagacggtcaaccggacaagcaacggcgttacggtagacggtgatcttccatggtacatacagtttcaggtacagttgaataatgataaatctgacagttccgttctgaacggtcagaatgtagatacttttatcagcccatatgagatgaagctgtgggatatgatgaatgataatgaatatcagttgaacggacaacaggtgcgcatcacgatgccggcaccggacgatcagctctatacacagcttgttgtgattcattatctgaaagatggaagcatcgagtatattactccgatttataatgcagacggaacactgagctttgtgacaacttctttcagtccgtacaatgtggcaggtctgaagattgcaggaagccagtctctggtaggcaatacggataaggcatatacaaataaaaatacaacaacttccggaagtactacgacaaaactgacaccgaatgtgtccgcaggaaatacaggcagcagttcaaacggaagcacatccggcagtgtgacaaagaaaaacacacagaagagccagacacagcaggcttacggtacgacactgaaaagagtcaatccgaagaccggagactatcagcagacagcctggtatgcaggactcgcggcagcagcgcttgcagcacttggtatcgcaggcaagaaaaaccgaaaaaagaaatctgaagccgataaggtatagaatgtacaaccctcccatatagtactgtatgggagggatttttttggatacagggaaaaacatctggatacaaaagagcagcagagtcataaaaggtctgatcgtgtcctatctggtcagcggggcagggcttttgcttctggcattgctgttgctgaagtaccagctggatgagagaaaagtgtccgctggtattctggctgtttatattctatccggattatcgggaggaatttatatgggaaaaacagcagaaagaaaaagatatctgtggggaatgatacttggcagtatatactggggtattctgatgctgcttaccatcttttccggtgcaggtacgggatcgggggtaaaaggtgcatttcttacacttcttatctgtgcagggtcgtcaactttgggagcaatggtgacgggagcctgaaaacagtggcagatcgtgaaaatagccggaagttgcgaaaaaaactctttgaaaatgaaagaacatatgctataatgcaagaagtaataacataaggaggaagcaaaatgaaacatattaaaactttaaatacaaaaagtttacagaacacaatgaaaaaaggtggatgtggtgaatgtcagacatcctgccagtctgcttgcaagacttcttgtacagtaggaaatcagagctgcgaaaacacaaaataagaaatcagcaggctctatgatgcttggaacatacaggcagcggtccaaaagccgctgcttgctttttgttacatagcatatcaagaattgatccggtggatcaattgtgattacattgtatatcgaagcagaagatgctgctgcgcaagaaaagaagaaggagaacaaataagtgattcatcagtataaaagtaatggatacgcaattgttctggatgtaaacagcggatccgttcatgtggtggacgatattgtatatgactgtatcgccctgctggatcagggatgttccaacgaagaagtgacagaaaaactgtcggcttcttattccggagaagacctgaagacagctcttaaagaaattcaggaactgaccgatgagggaatgctgtttaccgaggacatttatgaaaatgcgatagagcattttaaagaacggccaactgtagtcaaagcactgtgcctgcatattgcccacgactgtaatctggcctgtaagtactgctttgcggaagaaggagaatatcatggaagacgtgcactgatgtcctacgaagtaggaaagaaagcactggattttctgattgccaactccggaagcaggagaaatctggaagtagactttttcggaggggaacctctgatgaactggcaggttgtcaaagacctggtagcttacggaagagagcaggaaaagatacataataaaaacttccgttttaccctgaccaccaatggtgttctggttaacgatgaagtgatggagttttgtaacaaagagatgggcaatgtggttatgagtatcgacggacgaaaagaagtccacgatcatatgcgtccgttccgcaaaggtgccggaagctatgacttggtagttccgaagttccagaaatgggcagagagccgtaaccaggacaaatattatgcccgcggtacatttacccattataatcttgacttttccaaggatgtactgaacctggcagatctgggattcaaacagatatctgtagagccggttgtagcaccttcggatgcggactatgcactgcagccggaagaccttccgaaattgtttgaagaatatgataccctggcaaaagagatgatcaaacgaaataaagaaggaaacggatttaacttcttccactttatgcttgatctgaccggaggtccttgtgtatacaaacgtctgtccggatgtgggtcaggaacagagtatctggcagttaccccatggggagacctgtatccgtgccatcagtttgtaggaaacgaagatttccttcttggtaatgtggacgagggaatcacaaaacctgcaatctgtaaagattttaaaaattgcaacgtctatgcaaaagaggcatgtaagaaatgttttgcacgattctactgcagtggcggctgtgcggcaaactcctataacttcaaagggaaaatcgatgatgtttacgaagtgggctgcgagctggaacgtaagcgcgtagagtgtgcaatcatgataaaagctgctatggcagaagaagaggtataagaagatgaagaaaaaacagggagttcttgtgctgattcttacagtggttctgattggtctgttagcctttacaaccgctgtaggattcggcccgaccggaaccgggtctgcaaaaaatatcaagaccggtctggatctgtccggtggtgtaagtatcacataccaggcaaaaggagacgatccgtctcaggaagatatggatgataccgtctataaacttcagaaacgtgtggaagactatagtgaagaagcacaggtatatcaggaaggtgatgaccgtatcactgtagagattcctggtgtaaccgatgcaaataagattctggaagatcttggtaaaccgggatctctggaattccaggatgaaagcggcaacgtagttctggacggaagcgatatcgcaggtgcagacggcggtgtcacagaagatcagacaaccggaagcaaacagtatgtcgtagaactgacactgaccaaagacggtaccacaaaattcgcagaggcaactgcagcaaacctgaaaaaaagaatctctatcgtatatgacggagaaactatcagttcaccggttgtacaaagtgtgatctctgacggtaaagcacagatcagcggacagcagtctatcgaagaagcaaaagaactggcatctattatccgtatcggttccctgaaactggaactggaagaacttcgttctaacgtggtaggtgcacagctgggacagcaggcaatcaagacaagcctgatcgccggtgccatcggtctggtactggtcggaatctttatgattatcgtttacgctctgccgggtgtggtagctgctttgtcactggctatctataccggactggaactggtaatgctgaatgcttttgacctgacgctgacccttccgggtatcgcaggtatcattctttccatcggtatggcggtggatgcaaacgttattatctatgcacgtatccgtgaggaaattgcagcaggtaagagtgtaagaagcgccattaagaccggtttcgagaaagctatgtccgccattgtggacggtaacatcacaactctgatcgcagctgctgttctgggagcaatgggaagcggaagtgtcaaaggatttgccatgacactggctcttggtatcgttctttccatgtttaccgcactggtaatttccagactgctggtgaacgcattctatgcagtgggacttcgggatgaaaagttctacggaaaacagaaagaaagaaaaaccatagatttcctcggaaagagaaaattattctttacgatttctgttatcctgattctgcttgttccggttggaatgggcgtgttccatgcaaaagacggaaaagcattgaactacagcctggagttcatgggtggtacgtctacgaacgtaactttcaatgatgacatgtctatcgatgaccttgacagccaggtaaaaccggtagtacaggaagtaaccggtgatgcaaatattcagatatccaaagtcgctgacagcaatgcggttatcattaagacaagatctctgagcctggatgagagagaagaactgaaccagaaactggtagacagctttggtgtggatgacagcaagatcaccgcagagagtatttcctctacggtaagttctgagatgagaagagatgcgattgtggcagtcctgatcgctacgatctgtatgctgctgtatatctggttccgtttcaaagatgtacgttttgcatccagtgcggttctggcactgttacatgatgtaatggtagtacttgcattctatgcactgtcaagaatctctgtaggtaatacctttattgcctgcatgttgacgatagttggttattctatcaacgcgaccatcgttattttcgaccgtatccgtgagaatctgaagagtgccggcaagaaagcggatctgaaagaactggtaaatatgagtattacccagacactgaccagaagtatttatacatccttcactacatttattaccatatttgtagtatttgttatgggtgtatcttctatccgtgaattcgcacttccgatcatggtaggtatcgtatgtggtgcttactcttctgtatgtatcaccggtgctctgtggtatgtcatgaaaatgaaattaggaaaaagtacaaagtagaagagataggtaatcaaaaagctgttgcagcgatgcagcagcttttttcaatcacagctaagatgaggagcagacaacatggaaaaatggatggtagcagctaagcgggctaattttaaagggattggagaacggtttggcattgatcaggttacagcgaggattatccgcaaccgtgatgtgatcggggagaaagcaattgagaaatatcttcacggaagccggaaagatttttacagtccctggctgttgaaagatatggaaaaggcagtggctatcctgcaggagaaaatagaaaacagaaacaggatccggatcatcggagattatgatattgacggagtaatgtctacatatattttactggagagtctccgggggcttggatgtgatgtggatatgatgattccaaacaggatcacagacggatatggaatcaatgaacatctgattgaacaggcctggcaggaggggagagatacgattattacctgtgataatggaatcgctgcagtgacgcagatacggaaagcaaaagatctgggaatgaccgtgatcgtgacagatcatcatgaggtgccgtttgaagatctggaagggggaagaaaggagattctgccacctgcagatgccatagtcaatccaaaacagaaggcctgttcctatccttttgcaggactctgtggtgcagtagttgcaatgaaagtgatggaagcgttatatgaaaaaatggcaccggaagtggatctggtggacaaaatgcttccatttgcaggaatcgctacaatcggtgatgtgatggatctgcaggatgaaaaccggattctggtgaaagaaggattgcaaaggcttcatcacaccacgaaccttggtctgcaggagctgatccgggtaaataatctggaaccggagaatatcagtccgtaccatatcggattcattcttggtccgtgtctgaatgcttccggacgactggatacggcaaaacgggcattacagctgttgctggcagatagcagagaggaagcggctgtactggcaggtgacctgaaaaatctgaatgagagccgtaaggagatgacggcacagggactggaaaaagccatcgagcaggtggaatccacatctatgatggaagatacggttctggcagtctttcttccggaatgtcatgagagtctggcgggcattattgccgggcggctgcgggagagataccataaaccctccttcgtgctgacaagaggagaagagggtgtcaaaggttccggacggtcgatcgaatcgtattcgatgtatgaaaaactctgcgagtgcaaagaatatctgacaaagttcggtggacatccgatggcagcaggtctctcactggaagaagaaaatgtggaacgtttccgaagaaaacttaatgaacaatcaggactgacagaagaagatcttgtggaaaaggtgacgattgatgtgccgatgccaattcattatatccgaaaagatctggtgcaggaactgtcactgctcgaacccttcggaaaaggaaatgagaaaccactgtttgcacagaaaaatctgtggatcagccagatgcgtgtgttcgggaagaaccggaacgtggtaaagatgcgtctgacggatgaaaacggatatccgatggacggtgtgtacttcgggaatggagatgaatttgcggaagaagggagaggaaaaaggaaaatttctatcgtatactacccggatatcaatatgtatcagggacgtgaaagcttacaggtgatcatccgacattatcagtttgagtgagagcgttattgaacagttacaaaataacaaaaaatattgctcaaaaagatagtatatggtactatatatacaaaagtatggtatgcagaccatgaatataatgaagcaggagaaaagagcgagcttacctggcggcgcgcgccgctttggtttcgtttgctctttttcttttgaaatgttttgggaggaaagaatggcaaaatatgtaatggcactggatgcaggaacaaccagcaaccgctgcatcctgtttgacgaaaagggaaaaatgtgcagtgtggcacagaaagaatttacccagtattttcccaagccgggctgggtagagcatgatgccagtgaaatctggtccactcagcttggggtagctgtggaggctatgtcaaagattggagcatcagcggaagatatcgcagctattgggatcacgaatcagagagaaactgctatcgtgtgggatcgtcataccggagaaccggtataccgggcgattgtctggcagtgccgcagaacttcagagtactgtgactctctgaaagaaaaaggactgacagaagtttttcgtaaaaaaaccggtttgatcatagatgcatattttgccggtacaaaggtaaaatggatccttgataatgtaccgggtgcacgggaaaaagcagaaaaaggagatctgttattcggaacggtggagacgtggctgatctggaaattgacaaagggagctgttcatgtgacagattattccaacgcatcccgtacattgttgttcaatatcaatactctggactgggatgaagatattttgaaagaattgaatattccaagatgtatgcttccaaaaccgatgccgtcaagctgtgtatacggctgtgcggatccggcattttttggaggaaagattcccatcggtggagcggcaggagaccaacagtctgcattgttcggacagacctgttttacaccgggagatgcaaaaaacacctatggaaccggttgttttctgttgatgaacaccggagaagagccggtattttcggaaaatgggctggttacaaccatcgcctggggaatcaatgggaaagtttattatgcactggaaggatccatttttgtggctggagctgcgatacagtggctgcgcgatgaactgcgggtgattgattccgcggcagactccgagtatatggctaagaaagtaaaagatacccacggctgctatgtggttccggcatttaccggacttggcgcaccgtactgggatcagtatgccagaggaaccattgtgggtctgacccgtggagtcaacaaataccatattatccgggcaactctggaatcaatagcttatcaggcacatgatgtcatcaaggctatggaagcagatgcggggatccggctgaacgggttgaaagtagatggcggagcaagtgccaatgattttctgatgcagacccaggcagatatgatacaggctccggtaaaacgtccgtcctgtgtggagacaacagcgatgggtgcagcgtatcttgcgggactggctgtgggatactggagggatcaggaagaggtaagagccaattggtctatcgaccgtacctttgaaccggagattactgtggaagaacaggaaaaacggatgaagggatggaaaaaggcggtccgttattcatttaactgggcaaaagaagaagactgagaacaacagcagtcaaggtaaagtaaacaatcaaataagaacttgcagagaacagagacaggcaggaaaaacatccggtgacgggtgcttttctggctgtcttttttattgagttacaggaggaaaaagtatgtatgatgtaatcgttataggagccggtgtaagcggaagtgcgactgcccgggaattatccaggtatgatctgaaagtgggagtactggaaaaagaagaggatgtatgttgtggaacatccaaggcgaacagcgggatcgttcatgccggatttgatgcccgtcccggcagtctgatggcaaagatgaatgtacgggggaatcagatgatggaacaactgacagaagatctggatattcctttcgagaggaacggttctctggtgttatgttttgcaaaagatgaaatggaacgcctagaaaaactgaaaaaacagggtgaagaaaatggggtaaaaagacttcagattctttccggcgaagaagtacgccggatggaaccggatctttctaaagaagtatatgccgcattgtatgcaccgaccggcggtatcgtgtgtccttttgaactgaatctggcccttgcggaaaatgcctgtcaaaacggagcagaattttattttgatacggtggtggagcagattgaaaagacggaaggcggatatcggattcatgccggagagaaaacatatgagacccgttgtgtggtaaatgcagcaggtgtgtatgcagatgtttttcacaatatggtcagtgaaaaaaagatccgtattacaccgcggaagggagaatattatctgctggataaaaaagcgggcacaaccgtacaccatacgatctttcagataccgggagcatacgggaaaggagtcctggtgacacctactactcacggcaatctcctggtgggtccgacggctgtggatattgaggaaaaagaaggaacgaataccacaaaaacaggtctggatgaagtggcacagaaagcagtgcgaagtgttccaaatctacctcttcgccaggtgattacttcttttgcagggctcagagctcatgaggacggacatgaatttatcattcgggaagtggaagatgcagagggcttttttgactgtgcgggaatcgaatcaccgggacttaccagtgcaccggcaatcggagaactggtggcagaacttgtaaccggttatttgtgtgcaaagaagaaacagcattttgaggagaaaagaaaagggcttgtgaatccgaaaaatctttccagagaagcatatcaggagctgatccgggaaaatccggcctacggcaatgtaatctgtcggtgtgagacggtgacagagggggaaattgtggaagccattcatcgattgattcccgcgaagtcacttgacggggtgaaacggagaaccagggccggtatgggaagatgtcaggcaggtttttgctctccgaaaaccatggagattctggcaagagaatggaaagtgccgatggagacaatcacaaaggccggaaaagattcccggctgatcagaggatacaataaggacagcctgtaggcgaggaggagtaagatgaagacaacatatgatatcgtagttatcggtggcggaccagcaggtcttgccgcagcctgtgcagcatatgaccaggggatacaggatgttctgatcctggagcgtgacaaagaactgggaggcatcttgaaccagtgtatccataacggatttggactgcatacatttcaggaagaactgaccggaccggaatatgcaaaaaggtacgaggcggaagcagaaaagagaaagatttcctgccttctcgagacgatggttctggatatcagtccggaaaaagaaatcacagccctgaaccggaaagacggattatttaccattcaggcgaaagcggtgattcttgccatggggtgcagggaacggccgcgaggggctttgaatattccggggtatcgtccggcaggcatctattcggcaggaactgcccagaggctagtaaacattgaggggtatcttccgggcagagaagttgtgattcttggctccggagatattggtctgatcatggcaaggagaatgacgcttgaaggtgcgaaagtcaaagttgtggcagaactgatgccgtattccggcggactgaaacgtaatattgtccagtgtctggatgattttggaatcccgttgaaattaagtcatacagtggtggatatcaaaggaaaagaacgggtggaatctgtaacactggcacaggtggatgaaaaccggaagccgattccgggaacggaagaagagtatacctgtgacaccctgctgttatccgtggggctgattccggaaaatgaactttctgataaacttggtgttcagcttcatccggtgaccggcggtccggtggtaaatgagagcctggaaaccagtattccgggagtatttgcctgtggtaacgtcctccatgtgcatgatctggtggattttgtatctcaggaggcaactatggcaggaaactgcgcggctgcatatgtaaaaacaggaagaacagaagagactgaagagattccggtaaaatgtggatccggtgtgcgctatacagttccggcaaagatccgtccggcttatatggaagaaaaactgccggtgagattccgggtgggacaggtgtatcagaaggcaagcattacggtacgatccggtgataccgtacttttgagaaaaaaacgtcccataatggcaccgggagagatggagacggtatacataaaaaaagattctctctcaccggacaatatcgggaatgacataaccatcagcatagaggaggagtaaaccatggaagagaaaaaactgacctgtatctgctgccccatgggatgtcagctgcaggttacaatcagagacggacaggtggaaaaggtagaaggaaatacctgtaaaagaggagcagaatacgggaaaaaagaggtgaccaacccgacaagaattgtgacaacgacagtgcgggtacatggcggcagccttccggtggtaccggtaaagacagcttcagatattccgaagagtgcagtgatggactgcatccgacagttaaaagaagtggttgtagaggctccggtgtacatcggggatgtggtgctgacagaagttgcaggaacaaaaatcgcggtaataattactaaaaatatcgaaaaactttgtgaaaaacagaacttgtgatccctcagactcttaggtaaaataaatcgtaactattcagtaggtagtatctcgcaaggcgttttggctcgtaactgtgaaggtactgaacaattacaataaatcaaataaaagcaagaaaaggagacgggaaggaaataattatggcggtaaatgaaaaaaatatgaccagcggatctcctgggaaactgatcatcacctttgccattccactgatgcttggaaacgtgttccagcaattttatacgatggcagatacgatgatcgtcggtcaggtggtcggtgtggaagctctggcagcagtgggggctgcagactggcttgtctggctggtatttggtatcatgacagggatggcgcagggcttttcaattctgatatcccagtattacggtgcaggagagaaagaaaatctgaaaagagcagtagcaaaaagctatgtactgacagcgatactttcaataattgtactggtattgagcgaagtgaccgttcaacaggtattgcagtttttacatactccggagaatgttatcggactgagtttgatgtatatacgaatggtatttgcaggaattccaatcattgcagcgtataacatttttgccgcaatcctgcgggcactgggaaacagcagatctcctctgattgccatgattgtggcagcgtttatcaatgtgggactggatcttctgtttgtggcagtgtttggctggggtgtactgggagcagcgattgccacggtgatcgcacaggggttttcagcagcgtattgtctgtcggtcctgcggcacattccggatgtgcgtctgacaagagaagattttcatcagcagccggcgatgagtctgcggcttttaaaactggcagctccgctggcaatacagaacgtgattatttctgtaggaggacttacggtacagtacgtggtgaatggatttggattcctgtttgtggcaggatttacagctgctaataagttgtacggtgtgcttgagatggcatcgttatcctatggctatgccattaccacgtatgtaggacaaaacctcggtgccaaaaaatatcgcaggatccgaaatggtgtccgcagtggcgtttacatggcactgatcacatctattgtgatatccggtgtgatggtgattaccggaagaaatatcctgtcactgtttgtatccggagaagcggggcaggtaaaacaggtattggatattgcatacaagtatctgtttataatggcaatatttctgtgggttttatatcttctgtatgtctatcgttcagccattcagggactgggcaatacactgataccgcttgccagcggtgttgtggaattctgcatgcgagtgggtgtggcgctgttgctgccgaaactgatcggtgaggatggaattttttatgcggagatcagtgcatggagcggagcggcgattttactgatcgtcagttatgtggtaattatacgaaaatataaagaataaggtttcctcttcaatttttcccggtttcgtggtatgatgaagccagttcgggattgtccggaaagctatcggcgcagagagaggaatcaatatgaaatgtgaagaagcactgacaaaaatagaggcatatatcaatcatacattgaacgggcgggaactggaagagtttctggaacatgtaacatcctgtcaggagtgctatgatgagcttgagacctattatattatcagtgtgggtatgcgatatctggaagaggaaaatctggaatcttataatattccaaagatgttgcaggaagatctgcacaccagagaacggcaggtgcgaaggagaaatattctccggaaaacagcggttcttcttggtgtgctttttttcatagtgatactggttctgggactttcctatctgggacatctggaactgcccagactttttaatttacattcgttgttcagtttgtaaaagtctgagaaaggaataaaatatgagtgaaaaaattttactgattgacggacacagtattttgaatcgtgcctattatggactgccgaatctgaccaactgggagggattgcatacaaatgctgtgtacggatttttaaatattatgacgaaggtgctggaagaagaaaaaccggaatatctggcggttgcgtttgaccttcatgcacctacattccgccataaaatgtatgatgcatataaaggtacaagaaaacccatgccggaagaattgcgggaacaggttccgctgatcaaggaggttctgacggcaatgaaggtagctattgttaccatggaaggatatgaggcagatgatctgctgggaactattgcgggaatggcagaaaagaaagggatagatgcgacaattctgtccggtgaccgtgatcttttgcagcttgctacagatcatgtgttgatccgaattccaaagaccaagggcggaaaaacacagatagaagattatcacgcaaaagaagtacttgagacgtatcaggtgacaccagcgcagattattgaactgaagtccttgatgggagatacagcagataatattccgggaattccgggtgttggagaaaagacggcgacaaaaattattgctgcttacggttctattgagaatgcgcatgaacatcttgaagaaatcaaaccgaacaaagccaaagaatcgctgcgggatcactatgaccttgcagtgctcagtaaaaaactggcgaccattgatacagaaagtccggtagaattttcctgggaagatgcaaggatgggaaacctgtatacaccggaagcatatgattattttaaacgactggaatttaaaaatctcttatccagatttgaccagcaggagacagaacaaaaagaactcccttcctggcgtatcgtagaagatttcgcagaagcggagaatatctggaaacaggcagaacgggcagaacagataggaatcgctgttattgacggtatggacggagtacgtggcgttgcggtagcactggaagatcagaatacagtatatttcccggtggaaggttttcagacggaaggtgtgttatgtggtcacctggaacagctttttgccggagattcgcagatcggtgcctgggatgtgaaagcgatccgtaaaaagatagagattccggaacggaaaggaatctttgatcttggtatcggtgcatatctgctgaatccgctgaaaaacgattacacctatgacgatgtggcaaaagaatatctgggagaacagcttccgtcgcaggaagaagtattctccggtatgaaaaagccggatccgaaaaaagcagataatgaacaggtggcagcgtatggagcttaccaggcatatgtggcacttcatggaaaagacacactgaaaaaagcactgcaggaagcaggtatgtgggatctgtttgaagatattgagatgccgctggtattcactcttgatgatatggaaaaagagggaatccttgtgaaaggagaagaactgaagctgtacggtgaaaaattagaggtacggatcagggaactggaagagaagatttatgaggaagccggagaaaatttcaatatcaattcaccgaaacaactgggtgtgattctgtttgaaaaaatgaagatgccgggtggaaagaagacaaagaccggatattccacagcagcggatgttctggacaaacttgcaccggactatccgtttgtagccgatattctggaataccggcagctgacaaaattaaaatctacgtatgcagatggactggcgggatatatcggagcagacggaagaattcattcaacttttaatcagacgatcactgcgacaggaagaatcagcagtacggaaccgaatctgcagaatatcccggtgcgtatggaacttggacgtctgatccgaaaagtatttgttccacgggatggctttgtatttctggatgcggattattctcagattgaactgcgtgttcttgcccatctttccggagatgagatgctgatcaaagcgtaccgggaagcacaggatatccaccggatgacagcttctcaggtttttcatatcccgttcgatgaggtaacacctctgcaaagaagaaatgcgaaagcagtaaatttcggaatcgtctacggaatcagttctttcggtttgagtcaggatttgagcatcacaagaaaagaagcagcagattatattgaaaaatattttgccacttatccgaaaatcaagagttatctggacggagaagtggaaaaagcaaaaacggatggttacagtcttacgatgttcggccgccgccgtccggttccggaattaaaatccagcaactttatgcagcgttctttcggggaaagaattgccatgaattctccgattcagggaaccgctgcagatattattaagatcgcgatgatccgggtcaaccaggcacttcggaaagaaaatctccgttcccgtctggtgctacaggtgcatgatgagttgttgattgagacggcaaaagaagaagtggagcaggtatcggcgatcctggagcgggagatgcgtcaggcagcagtactgtctgttccgctggaagtggatatgcacacaggcgaaaactggtatgaagcaaaataacagttaacggaatgagcgaaacgataacaaaagaaaggggagataccagatgaaggtgataggagtaaccggtggcgtaggtgccggaaaaagtgaggttctgggatatattgcagaacattggaatgcaactgttgtggaagcagatgaagtggggtatctggtcatgcggccgggaaaagcctgctacagtgccattgttgatctgtttggaacggaaatcgtgaaagaagatcagacgctggaccgggaactgattgcaaaaattgtatttgagaacaaagaaatgcttgcgaagatgaatggaattgttcacccggcagtgaaagaatatatcaaaaaagcaataaaacgagaagaagagaatgagacaaatatttttattgtagaagcagctctgttgattgaagataaatatgatgaaatctgtgatgaattatggtatatttatgcagatgaagagacccgcatggagcgattgaagcaaaacagaggatattcggaagaaaaatgccgcagtattttcagaaatcagctcagtgaggaagaattcagtgatcactgtgattttgagattgacaacagtgatgattttgaaaaaacaaaagaacagattcaacaaaagatgcaaaggatgcagattgatgaggttatgtagtattgcaagcggaagcagcggaaattgtatatatgtgggaagtgataagacgcatcttctggtagatgcgggaatcagcggaaagaaagtggagttcggactgaattctctggatcttaccacaggtgatctggatggtattctggtcacgcatgaacattcggatcatattaagggtctgggtgtagtggcaagaaaatgcggagtgccgatttatgctacacagggaacgatccgtgctatggaaaattccgggagtcttgggaaaatgccggaaggcatttttcatgaagtgacaccggatcaggactgcccgatcggagatcttacgattcatccttttcgaatctctcacgatgctgccgaaccggttgcttatcgaatcggacagggcgacagagaagtgggaattgccacggatatgggcgtttatgatgagtatatcgtgaaaaatctggaaggattggatgcattacttctggaagcaaatcacgatgtaaatatgcttcaggtaggtaaatatccttactatctgaaacgcagaatattaggtgataaaggtcatttgtccaatgaaacggcaggacagttgctttgtcggctacttcatgataatatgaaacagatcctgctgggacatctgagcagagaaaacaactacgaggcgctggcttatgaaactgtctgtgcagaggtgacaatgggtgataatccatacaaagcaaaggatttccgaattgatgtcgctcacagagatacagcatcagaagtagtagaagtgtaaaggagaagaaagatgaaaaaaacaattatcacagtagtaggaaaagatactgtaggaatcattgcaaaagtttgtacttatctggcagataatcaggtgaatatccttgatatcacacagactatcctggatggctacttcaacatgatgatgatcacagatgccagtgcatgtgagaaaacaaccggtgagatcgcagaagaactcaacacactgggtgaagaaatcggtgtaaatatccgttgtcagcatgaggatatctttaacaagatgcatcgtatctgagaccggcgcaggagggcagaaaaatgattaatatgtttgaagtaaacgaaaccaataagatgattgagcaggaaaacctggatgtgcgtacgatcacactgggtatcagtctgttagattgtatcgacagcgacctggagaaagtcaatcagaaggtttacaataaaatcacaggactggccaaaaatctggtacagaccggtgaggatatttccaaagaatacggaatcccgattgtaaataaacgaatctcagttacaccgatcgcactgatcggcggtgcagcatgtaaaacaccggaagactttgttacgctggcaaagacactggataaagtagcaaaagaagtaggtgtaaacttcataggcggttattctgcactggtatctaaaggtatgacaaaagcagatgaactgttgatccgttctatcccgcaggctcttgccgagactgagcgtgtctgcagttccgtaaatctcggttccacaaagacaggaatcaacatggatgctgtaaaactgatgggtgagatggttcttgccaccgcagaggctacaaaagaagacgattctctgggctgtgcaaaactggtcgtattctgtaacgcaccggatgataacccgtttatggcgggtgccttccatggggtgacagaagcagatgcaatcatcaatgtgggcgtcagtggacctggtgttgttaattacgccctgtcacaagtaagaggtgagaacttcgaagttttgtgtgaaactatcaaaaagactgcattcaagattacccgtgtcggacagctggttgcacaggaagcatcgaaaagactgaacgtaccttttggtatcgtagacctgtctctggcaccgactccggcaataggagattctgttgctcagattctggaagagatcggtctggaacgtgtaggcgcaccgggaaccacagcagcacttgccatgttaaatgaccaggtgaaaaaaggcggtgttatggcctcctcttatgtcggtggcttaagtggggcatttattccggtcagcgaagatcagggaatgatcgatgcggtcaatctgggagctttgtctctggaaaaactggaagccatgacctgtgtctgctcggtaggtctggatatgatcgcgattcctggagatacaccggcaactacaatttccggtatgatcgcagatgagatggcaatcggtatggtaaaccagaaaaccacagcagtccgtgtgattccggtcatcggaaaaggtgtgggcgaaactgtagagtttggtggattactcggttatgcaccggtaatgcctgtgaatactttccgttgtgatgatttcatcaatcgcggaggaagaattccggcaccgatccacagttttaaaaactaaaagattcctgaaaaaatacttgcgtatttttggagagactgttatacttggttctatcagatagttctttatctgatagaaccttttttataggttcattccggcagttctgccaaagattccaattttaaaaaattaaaacaggatggataaaatctttatacccggagggatttttgcgtccatgaacaggagagcaggtgataggaaaacagagcattaaatatatacatatccggtacgatatctaaaaacacgtcaacaaacatagcaacaatcatatcaacaaacatatcaaaaaaagcatatcagaaacaaatcaaaggagaaatacacaatgaaaaacaaaacatggaaaaattatcttggtgcggcagcgttggtaactgttctttttgcaggctctgtatctgcttattttactgatcaggatgaaaaagtaaatacgtttactgtgggtaaagtaacgattgagctggaagaaccaaaatgggagaaaaaaccggatgataacggcaataagattccggatgaagcagagcgtatgacgccgaatcagacgatcatcaaggatccacaggtgaaaaatacgggaaataatgatgcatttatatatatgacagtagaagttccatgcagacagatcatttcagtaaataatgatggtacgagaaatccactggcgatgagagagttatataactatcaggtggataattcctggaaactgctgggaactgtggacgtgagcgatgaaagtggaaagaaggttgcggtaaaacatctgtatgcgtatgcaggggcacagggaatctgtaccgtagtaaaaccacaggagacaacaaaaccactgtttaatcaggtgacctttatcaatgcgatggaaggacagggactggaggaaaatacctataagatcaatattcaggcatatgggatacagacaacggatctgaatggcggaacaaaagatgcagctgaaatctggaatattatcaccaatcaaagagaacttacggaacgattttcttaacagaggagagtgacgaggatgaaaaaaattttatccatagcggggatcgtctgcttcagtatgctggttgcggtcggtacacatggaatctacagttggtttaccgatcagagccaacgagtcaattctttttctgttgggatgaatgaagtagagatcagggaagaatttccggatcaggaacttacaccggggaaaatcattaaaaaagaagctggttttacgaatacaggaatggttcccatgtatgtgagggcggtttacctgttcagcaacaaggaggcggaagaaggaagtgaacttctgatggggagtactttgtgggagaaatcagacgatggatattactattataaaaagatagtacagccacaggaaagcacggaactttttctgaaaggaattcactggaaaaaacagaaaattacggatggatttgatttgacgatatataccgagacagtacaggcagctggacacagcagtgcaaaagaagcatttgcgcggatgatggagcggcaggaaggtgggcaggtatgaaaaaaacagggaaaatcagtgctttgttatgtgggttactgctgatcggaatctcaggaatctacggattgccgaaagcttatgtcctgtatcaggcaaacagtggaaaagtagcgattcatctggaagaatatcggatgaatggggaaaaggaagttccatgggaaacagaagaaaatgtacttccgggtgggctgatatccaagattccacggatcgttaatgatggagcagattgctatgtgcgtgcgaaaatagtatttacatcggaggaaacatcggatcagccgttgtctgcggacaatctggaagggattggcagtgaatgggtgcaggatggagagtatttttactgtaaggaagtggtaaagagcggggagagcgttgactttttccggggaatccggttacctgccgaatggaaagaaagtcctgaggcagagaaccgatggcaggcgagtgtacgggcagaagcagtacaggcagagtgtttttttcctgatttttctgtcagtgatccgtgggggatgaagacaaagcagtttgttatccgccaggcaatggaaggagaagcagaagaacaggatggtgacaaagaccagatggaactcgtgattgcatcggatctgcaggggttcacgatggaacaggaagggtgtatgaaacaactggagacatttatgccgggaaaaagtcagtccggaaaagttgtgatcagaaatggagcagatcataaacgggaagtatttttccgggcagaagccccgcagatgacaccacttctggaaaaaatggaaattactgtgcaggtcagagagaaagatcagatacagattctctatcagggaacggtgacagagacgatgttaaaacaaaatcagtctctgggagaaattctcccgggaaaggataaacaagtagaattcttattttctcttccggaagaggcagataatgtatatgcggcacaaaccggtcaggtaaagttttggtttaccacgggagcaccacaaaagactcagatagtaaaagtggcaaaaacgggagacagccagtatccggggtactatcttataaccggtattgcgggagctgtactggcagttgtagttcttggaaaagaaagcatcaggaagaaaggaataaaaagcagatgataaaagcgacagaaagaattctgcgattctttctgacggctgtggggatggcaggattttgcctgttccttctcccacagactgcaggatgtacaccacgtgtggtgatcagcggatctatggaacctgcagttccggtgggaagtatcgtatacacaaacagatggatcaaacaggaaaatataaaagaaggagatattattgcctatgggttatcagggggagtatcggttcttcacagagtcgtggaaacagataaaaacagcagaatatggagaacaaagggagatgccaatgaggtcagtgatcccggagcagtatcgtatgaacaatatcttggaaaaatgatcttttcactcccttatgtgggatatctgatatctgtgtttaaaaggaggagtatctggctgggaactattgcagtcggtatattactgctcatattacaacagaaggaaacatggaaaagcggaaaggagaagacggtttgaaaatatggaaaagaaaagtaatcgggcatggtgtactgggaatcttactttctttcgtcattgtcggcaacgcaaccggaatctacggagccgacatcgacgatacagtaccggtagaggcagaaagtgaaatgacagatagcgggaaagaagaacagcaggagattacgcaggaaaaaacacaggattcagatgatccggaaccgtcggcagaagaatcgcaggagatcagtcacgaaagtgaggagaaagagaatccggaaaaggatgaagcagacaaaataccggagacagaagatgggctgttctatctggaaaacagcgaggaagagatagatacatattcttttgacaacagcagcgaacagccggtagcaaatgttcgatatgacaaatttttatggccatccggtggaaaaggttctgcatcctgcccgaaccttggcatgggaatgaaatatattgtcggggatgatcagaacgttgacgggggtggaaaatggagatatgtctattgtgtggaatatcaaaaggactgcccaatcggaggacttaagatgcagtttaaaggctggagtaaccgaaaagttgcctatgcactgtattacggtgcgctgtattatggatatccatgccgttatgagccatattctaccggtgactggcagatggactactttgtaacgcaggtagctgtgcacattctgaatggagaatttacccttgcagcggcgagaaacgggatgaacaaaagtaatgccacaacagcagaaaaaaatctcgcctatgaccggatcagtaaaattgtggcagcagccaatgaaacaagtaattatggtgggtttactgctgacggatggctggatatggaaagctgtacgttttctctgaatggttataataacagctggagcctgcaaaatggaaggtacctttcaggagggaactttcatgggaactttcagtcctattatgggtatgattttcgcgaacagttgacaggttatgagatcagtgctccacagggcgttcagattgaaaaaaacggtaatcagacatacgcagattttcgggcagcgattccacaggcacagtacagaaaatggcagctgacaggcatgcagataccgatcacggtgacagcttctctgccaagatactggggtggaggaatctataaaagcaattcagcttcaaatttccagagtatctgcttgctgacctgggatgcttccggaggtacgacaagaaaacaggcaagagccgatttgaatattgaaaaagtgacaaggaatctgacaatctacaaaaaggatcaggagacacagagaactttaaaaggtgcactgttttcgttgtgggcatatgacggaaatggatacagcaaaaagatcggcaatttccaggatatgcaggatggaagttaccagataaaaaacatttcttatacacagacaaaagatggctggtttctgatcaaagaagagcgtgcgccggaaaactataaaaagacataccagctggcaaacagtttggatgaagaaaactaccgccagtatggagggcgtgaaatacgtatgaatgagaatggtttttattctgaccgtgtggaacagccgtgtatcttttatgatgagaaagaagaaccgaaggcaaaggtatatgtaaaaaaatatgatatcaaatccagaaaattacttacaggagcacaattccagatttatccgtggatacaagaggaggaaaagtacagtgatcaggcacttcagacattatcttataacagtcagaaacaacagtatgagacagaaaaagaagtgattgcagataaagcgaatcagggaaagttcctgatccgggagacaaagttgccacagcattactgtggaatctggcagcaggaaattaccgtaacggaaccgggaacgacgacactggaacttgaagcatggaactatccagaacgaaaatttacgatctataaaaaaatccggacagatgagctggtatgggcacacggtaatcccacgttctttttcaaaatttcagggaaagatctgaatggagaagaacactggtatcaaagtgtgatattatttacaaaagaaatggaaaaacaacaggaatacatcatcggaaaagccgagatcaccggaattcctgcaggaatttaccagatagaagaacttcctctgacggcacggtatattctgacaggtgttacctcggaggatgacaatgtgactgtggtcaatactccgacagatacagtgaatggagttcaaaagatcaggtcgcaagtgacggcagatctgacgatggaagatggaagtgtaacttttgaaaacaggaaagtatttttcgacgaatactctcacgatgatgtagaagtcaatcatctgaaagtatcggaagagaaaagcagtaaacagtaaaaaaactgtaactgttcagtaccttcacagttaagagccaaaatgcatttaaacgataaaaacacgctttgcgagtttttatcgttatcgcggcactcctcaaggttccgtgcaagcacggactttgactcgttgctcgcgtaaatcaccttcggtgatggcattttggcttgcatgtctcgggattttggcatattcatgccaaaacacctcgaggtacagtggctactgaatagttacaaaaaactgcagataacaggaaaaacagttatctgcagaaaaaaagatatcgttatcaggggagaatcacgagaggctttcggtattcatgcacaaatgtggtgtgatatttttcacaccagacagtttcgtaaagatttgaaatctccacattttttgaaaaaacagccgcggtttcgtcggacaacagggaagatgcatctgctgcttttgtaatgaccggaatggaactgtgctttttgagctcagaaagaaccggtgctgcctgacggcgaaaaccgagaagccttgcgtaggaaagtgcagggacatgggaaatctgcagcagacagtgcatcagcatccgacagatccggctgtaggtgagttcccgtgtttttaagagtgctgcatactgtccccagctttcataagaactcctggtgtgaaagagacgctgtacaaaggacggtgtaacatcctgataagctgcaagctgagccttgtcagaagaaaacagaagccagcgaagataaggagaaaaatcttcctcatccagaaactgtgggcaggaaaaagtctgcgaaagaagcgcagatatggcgggcggaaaacaggaagacacagcagcgtctgacatcttaaagtccgcagatttccacagggcacggatggcagatgcagagggaaactgtccattcaatgagttgtcgtgataggcatttccttcacgctttaccgtaagcggccgaatcgtactgttctgccgacagagtgctttacagtattccacaccgagaatattattcggtgtctgcaaaaaggttccggtatcggcatcggtgtctgaaagtagttcctggagagtgagactgcgcgcttttggaaaggattctcctttttttagatatttttttataagattctggtattccggtgtttcagcggagagaaaagacccgagtttcaaaaacggttcaatcgttccgctttcgcttccaaaagaaagaacgtccacacaaccgagtccgtcaagaagtccgacggcattctgggcaaagaattctgcgctctcgcaggcatgggttgacggcagttcgaagacaagatccgcaccaccgagaagtgccatccgggcgcgcagatgcttggaatacagggcaggtgctccccgctgtacaaaatctccgctcaggacaacaatgatataatcggctcctgtaagttctcttgttttttgtatatgataagcatgtccagtgtgaaacggattatattccgcaatgattccggcaattttcatggttgcacctcaaaaaatacataaattattttctcattctaacagggaaaatgcagaaaaacaaggctttccggagaaatagagaatatatgttaaaaaattaactaaccttgtcactgtaaaggaaaaagagtataattttatgtagtgagcaaaataggaaaggagtcatgaaatcatgggatttattgacacaatcaaagcaagagcaaaagctgataaaaaagtaattgtacttccggaaaccgaagacagaagaacatatgaagcaactgcacagatcctgaaagaagaaatcgcagatgttgttctggttggtagcgaagaagcaatcaaaaaaggcagtgaaggactggatatttccggtgcaaagatcgtagatcctgctacatccgaaaaaacccagggatatattgacaaactggtagaactgagaagcaaaaaaggtatgacaccggaacaggcaaaagagattctgttaaaccagtatctgtactacggtgttatgatggttaagatgggcgatgcagacggaatggtatccggtgcatgccactctaccgcagatacactgagaccgtgtctgcagatcctgaaaacaaaaccgggaacaaaactggtatccgcattcttcctgatggtagttccggattgcgaatatggcgcaaacggtactttcgtatttgcagattccggactgaaccagaatccgaatccggaagaactggcagctatcgcagcttcctccgcagaatccttcaaactgctggttgaagaagaacctgtagtagctatgctgtcccattctaccaaaggcagtgcaaaacatgccgatgtagataaagttgtagaagctacaagaatcgcaaaagaacagaatccggatctgaaactggacggagaattccagctggatgctgctatcgtaccgagcgttggtgcttccaaagccccgggaagtgaagtagcaggaaaagcaaacactctgatcttccctgacctggatgcaggaaacatcggatacaaactggtacagagactggcaaaagcagaagcatacggacctgtaacacagggtatcgcaaaacctgtaaacgacctgtcccgtggatgctcagcagaagatatcgttggtgttgttgcaatcacagcagtacagtgccaggcggaataaaacagatacataaaagtatgtttaagtggaggaagaaaacatgaacgtattagtaatcaactgcggaagttcatctctgaaatatcagctgatcaactccgatacagaagaagttctggcaaaaggtctctgtgagagaatcggaatcgacggaagactggtataccagaaagcaggatgcgacaaagaaatcacagaagcttccatgccgacacataaagaagctatccagatggttctggatgccttgaccaatgataaaacaggtgcaatcgcaagcctgaaagaagtaaatgcaatcggacaccgtgtcgtacacggcggagaaaaatttgcgtcttccgtagttatcacagacgaagtaatccaggccgtagaagagtgcaacgatctggcacctctgcacaacccggcaaacctgatcggtatccgtgtatgcggcgaactgatgccaggtgtaccgcaggtagcagtatttgataccgctttccatcagaccatgcctgcaaaagcatatctgtatggtttgccactggaatactataaaaactacaaagtaagaagatacggtttccacggtacaagccacagcttcgtatccaaacgtgccgtagaattcctgggactgaacccggaagactccaaagtaatcgtttgccatctgggtaacggatcttctatcagtgccgtagtaaacggaaaatgtgtagataccaccatgggtctgactccactggaaggcgttgttatgggaacccgttccggtaacatcgatccggctatcatggaattcatcgcaaagaaagagaacctggatatctccggtatgatgaatgtactgaacaaaaaatccggtctgttcggtctgtccggcggtctgtcaagtgacttccgtgacctgaacgaagcagcagaaggcggaaaccaggatgcagcaaatgcaattgacgttctggcatacggcatcgcaaaattcgttggtggctatgtagcagctatgaacggagtagatgcgatcgtatttaccgcaggtatcggtgagaatgcaattccggtacgtgaaaaagtagtaagctatctgggttacctgggagttacactggacaaagatgcaaacggacacagaggagaagaaatcgtaatttctactccggattccaaagtaaaagttgcagtaatcccgacaaacgaagaactggctatctgccgtgaaacagtagctctggtataaaaacagagaaaaactgtaagattatatataaaagaaagtccccttttgactgtaagccgaaggggattttcttcccactgaaagaaaggataatctgcaaatattaaaagaatatttcagaaatattgcaggttatcaggaaaaaaacagttgacaaaaagaaaatgcttctgtataattggagaagtgtggttaggagtgaattatgctgattgatttgtccaaattactaactcatgaaggaaagcaacaacaggtagaaatattcccgtcaggagatactttttcctgtgaactgggtgaattttcttatggagagaaggaaccggtgaaactgacgatcaagcacaaagagaatcagattctgaatatcagtgcgaaaggtcaggttgctgtatggattccatgttccagatgtctggagccggtgttggtatcgtgtccggtcgattacgatgaggagattgatatgaagctgtccgaggaagaacggattgaggcattggatgaaagcagttttatccagaacaaagagctggataccgataagctgctgcataatgaagtactaatcaattggccaatgcgggtactctgcaaagaggactgtaaaggaatctgtagccgttgtggagcaaatctgaatcagggatcctgtgattgcgatacggcagatttagatcccagaatggctgttatcagtgatatatttaagaattttaaggaggtgtaactgatgtccatctgtccaaagaataaatcatctaaagccagaagagataaaagaagagcaaactggaaaatggctgctccgaacctggtaaaatgcagcaaatgtggtgcgctgatgatgcctcacagagtatgcaaagcttgtggttcctacaacaagagagaaatcgtttctcaggaagcttaattcaagcaataaaaaacagatccgtaagggtctgtttttttgttgcgttacatatcaataatcatccagtggaccaattttgattttacagtaagctgctgccctgtaaagtaaaatacctcgcggcatattcgctgtttttatataaaagtggagaaacgatgtgctagagcgtgtttgaaaaataaaaattgcacaaaccaaatgttgcatttccctttttcatgataaaataaagaaaaaggggtgttcagtatgttgagacgatatgagttaacagatgaagaatggaaccgtattgcaccattactccctcctgaaaatacaggaaaacagggacgtccacgaaaagataaccgcatcattcttaatgggatggtctggttggcacgcagtggtgcaccctggcgagatcttccagaacgttatggttcctggcaaactgtatatagtcgttttcgtaaatggattgatgatgggattctggataatatttttcgcattctaagcctagaggctgaactggaagaattatctatagacgcttccattgttcaggctcaccaacatagcgcaggtgctaaaaaaggggggcctcgaatgaaatcggacacagccgtggaggagccagtaccaaaatccatgcaatagtagattcttatggctatccagtgtattttatgatcagtgaagggcagcgtaatgatatcaattatgcaattcctttactggatcatatcgaaatagatggaagcaaggttctggcagaccgtggatacgacagtaatcaattgatagattacatttacgatcatggcggtgaaccaaccattccatcccgccgaggagctaaatttgaacgtcgctgcgattggtggttttataaggaaagacatctggtcgaaaattactttctaaaattgaaagcatttcgccggatagcaacacgttatgacaaattagcattcacttacctagggttcttatgcatcgtctcaatattaatttggttaaaatgaacaacttaaaatgtttttcaaacacgctctagagcgtgtctgaaaaatcatttccgcaatctgcaagccccactttgcggtatattttaccctcattcggttgccgtagcccgctacgccgccctcattcggataaaatctcccacaaactgggactcgcagctcacgaaaagcctttttcagacacgctctagccagagcacagaaacagacaggtgaaatgagttttaataaaaaggagcaacaaaaaaccgacagactatcaaaagcctgccggttttctgttgttcttaaaaattataattttacaacgttagctgcctgcattccgcgagcgccttcggttaaatcataagttacagcctgtccttcatctaaggatttgaagccttctccctggattgcagagaaatgaacgaatacatctgctccgtcttctcctgtgatgaaaccatagcctttttcagcattgaaccattttacagttcccttgttcatgatattacctccataaaataaaataaatagaaaatatgatgcagaagaataattccagagataaaaaatccacccggctctggagattagcattgataaaataaataataatcccgttcagcccgatgggtaatattagatatatccaatttccttctacaatgctcattatagttggaatatttgtaaaagtcaagcagaaaaaggctttatttcagtacagttttcgtgtatgatagtagatggaaaacagggttccttacagagagaggaaacgaaaaaaagtgtgaagatatgcaaaagatgcagaagcttcaggaaaggatgcaatatgaaaatcctgataaaaaatggtcatgtgatcgatccggatacaaagctggatcaggttgcagatgtactgctggaagatgataagatccaggaagtaaaagaaaacatcaaggataaagcggacagggtgattgatgccagaggctgctacgtcatgccagggctgatcgatatgcatgtacatctgcgtgatccggggctgacacataaagaggatgtatttaccggatcgaaggctgcggcaaggggtggtgttaccacgctggttgccatgccaaacacaaaaccggtcattgataatccggaacggctttcttatgtaaaaaataaagcaatgcagtgtaatctggtcaatgtcctgcaggcaggagctatcactcaggggatgaaaggcgaggagctttctgatattgaagggatggttcaggcgggcgcgccggcgatcagtgaggatggaaaatctgttatgaatgcgcagatttataaagaggcgatgcagattgcagcacgcatgaatattccggtactggcacattgtgaagatattcatatggtaaacggaggctgtatgaacgaagataccaattccgagaagtttggtctgcctggaatttgtaacgcagtggaggatactattgtagcaagagatattttgatcgcaaaagataccggatgccacctgcatctttgtcattgttccacaaaagacagtgaagtgatgctgcgtttggcaaaagaagaaggaatctctgtatccggtgaagtatgcccccatcattttacactgacttcggatgatatcgtggaaggtgatactaattataagatgaatccgccactgcgcacaaaagaagaccggcaggcacttctggaagggctgaaaaatgatgtctttgatgtgatcagcaccgatcatgcaccacatacgatggtggaaaagggtgtttctatgaagagcgcgccgttcggcatcgtgggactggaaaccagtgtatctctgactattactgaactggtggacaaaggatggatcacgccgatgcagatggctgaaaagatgagttacaatccggctaagatcctgcatcttgccaacaaaggatccctgaaaccgggaaaagatgcggatgtggttgtgatcgacccgaaagaatcttatgtgatcgatgtgaaagattttgtatcgaagggtaagaacacaccgttccagggtaaaaaagtaaacggtaaagtgaaagtgacgatttgtggtggaagagtcgtgtacgaagataaataaaacaggaaaaggcaacatacagaaagcaaaaggcgaggagaaaaacagatgattaacaaattgattgaaaaaatccagaaaacacatgcaccgatcgtagtaggtcttgatccgatgttaaattatgtaccggaacatatccagaaacgtgcatttgcagagtatggtgagacactcgaaggagcagcagaagccatctggcagttcaacaaagagatcgtggatgctacctatgatctgatcccggcggtaaaaccacaggttgccatgtatgagcagtttggtatcgaaggtgtgaaagcgtttaaaaagaccgtggattactgccatgaaaaaggactggtagttatcggtgatgtaaaacgtggagatatcggttctacttccgaggcctacgcggtaggtcatctgggaaaagtaaaagtaggttcccagcagttcgcaggatttgatgaggatttcgctacggtcaatccgtatctcggttctgacggcatcaaaccgttcatcaaggtctgcaaagaagaaaacaaaggtctgtttatcttggtaaaaacatccaatccatccagtggagaattccaggatcgtctgatcgacggccgtccactgtatgagtgggtaggagaacaggtagacgcatggggcaaagaacatatgggagattcttatagttatatcggcgcggtcgtaggagcaacttatccagaacagggaaaagtattaagaaaactgatgccgaagacctttattctggtacctggctacggggcacagggcggaagaggaaaggatctggtgcatttctttaatgaagacggactgggtgcgatcatcaactcttccagaggtatcatcgcagcatacaaacaggaagcatatgcacagttcggtgcacagaattttgcagaagcatcccgacaggcagtgaaagatatgatcgcagatatcgacggtgcactgcaggcggcaaaataaactggaatagacaggagtatcgaacatgaaaaagaaagaaatctgtactgtgatccgtcagaaagaaattggtgacggaatcttcagcatgtggatccagacggaaaacattgggaaagaagcaaaaccgggacagttcgtatcgttgtatagtaaggatggaagtaaactacttccgcgtccgatcagtctttgtgagatcgaccgggaaaacagccgacttcgtctggtgtatcgtgtcacgggagcgaagaccggaaccgaagagttttccagactgaaagccggagatacgatcccggtgatcggaccgctgggaaatggcttccctgtagaaaaagcagaaggaaaacgagcttttctgatgggcggaggtatcggagtaccgccgatcctggaactggcaaaacagatgcagtgtgagaaaaaacagatcgttgtgggataccgtaacgcgcagacgttcttaaaagaagaattcgaagcagccggagaactgtatatttccacagaagatggcagtgtgggaacaaaaggaaatgtaatggatgcgatccgggaacagaaattggaagcggatatcatctatgcctgtggtccgacaccgatgcttcgagctatcaaacagtatgcagaggaaaatggtatcgaatgttatatctcactggaagagcgcatagcatgcggtatcggtgcctgcctggcctgtgtctgcaaatcaaaagaaaaagatgcacacagcaacgtgaataataagagaatctgtaaagacggaccagtttttctttctacggaggtggaaatctgatggatatgagtgtaaatattgccggcgtagaatggaaaaatccggtaactgttgcatccggaacttttggatccggagaagaattttcagaatatgtggatctgaaccgcctgggagcagtgaccaccaaaggtgtggcaaatgttccttggagcggcaaccctacaccccgtgtggcagaagtctacggcggtatgatgaatgcgatcggtctgcagaacccgggaatcgatctgttctgtaagcgagatatcccgtttctgaaacagtatgatacaaaaatcattgtcaatgtatgtggccatgcaccggaagaatatctggcagtagtagaacggctggcagacgaaccgattgatatgatggagatcaatatttcctgcccaaatgtaaatgcgggatttctggctttcggtcaggatgcacaccatgtggaagaactgaccgggcagatcaaaaaaattgcaaaacagccagtgattatgaaactgacaccgaatgtaacggatatcacagagattgcaaaggcagcggaagccggtggtgcagatgcggtatcactgatcaacacactgaccggtatgaagattgatattaacagaaagacttttgccctggcaaataaaaccggtggtgtatccggtccgatcgtaaaaccgattgctgtccgcatggtctatcaggtggcacaggcagtcaacattccaatcatcggtatgggtggtatctcctgtgcagaagatgcaatcgaattcatccttgccggagcaagcgccgtatccgtgggaacggccaacttccacaatccggcagtgacgatggaagtgatcgatggaatcgaagactatatgaagaaaaacggattcacatcagtaaaagatatggtaggcattgttcgataggtgaaaatggagatatattaatttatcactagaaagtaacaaaggcttttgctataataagaacaggtaaaggcaccggaagaaaaatatttcttctggtgcctttttgcggtatattgaattaagtcgtacttcttactcgcacaatcctcaaaaatatttgcaatccgctcagttttcgcgagaccggaatttatgcaacagttgaaaaaaagtgcgtaacgtagtatacttatactaaatatggaaaaattcgggcacaagccgaaaaacaggaggatgacagagcatggaacagtataagcaggattttattaaatttatggtagagagtgatgtattaaaatttggagactttactctgaaaagcggaagaaaatctccgttttttatgaatgcaggtgcgtatgtgacaggatcgcagctgaaaagactgggtgaatattatgcaaaagcgattcatgatatctatggagacgattttgacgtattattcggaccggcctacaaaggaattccgcttggtgttgtaactgctattgcttacagtgaactgtatggaaaagaagtacgttactgttccgacagaaaagaagaaaaagaccacggtgcagataaaggaagctttctgggaagtaaattaaaagacggtgacagagtcatcatgatcgaggacgttacaacttccggaaaatccatggaggagactgtgccaaaagtaagaaatgcagcagatgtaacaatcgttggtctgatggtatccctgaatcgtatggaagtaggaaaaggcggaaaaaaatgtgcgctggatgaaattaaagatctgtacggatttgacacagcagcgatcgtatccatggctgatgtggtagaatgcctgtataataaagaatgtaacggaaaagtagtgatcgacgatacattaaaagcagccatcgacgcatattatgaacagtacggtgcaaaatagaagggaaagaggtaaaagatatgagtaatgaaaaaatttaccgaacaatttcccacagcggcggtgccagccttgcacttggcatcgtggtactggtgacaggaattgtctccggtgtgctgatgatcgtaacaggagcaaaacttctgaaacagaaatatcagattactttttagaaagaaggcagccagagtacggggatcaaggggtaaaaaaagaagtgaaagatgaaacaaaaaacagaatccgggtcataagctggattctgtttgtgatttatataggattgctgatctactttctgtttctctcggaagaatatggaaggacaagttttgatcagcggatgtatcgatacaatctgacaccgtttcaggaaatcaaaagattctggatctatcgtcaccgggtaggattctgggtggcatttctgaatctggcgggaaatgtgatcggtttcctgccgtttggattctttcttccgattctgagcagacgcttacgaaacggagctgtggtaacggctcttggatttggcttaagtcttctggtggaatcgatccagctggtttttaaagtgggatgttttgatgtggacgatctgatcttaaatacactgggtgtattgctcgggtatctgtccttttggatctgtaacgggataaggagaatgatttatgagaagaaaatttaaatacacatttaccagaaaagaagagacagagggcggtttttcttcactgatttttgccggctgctcgctgctgctgtttctggtatctgcgtgtctctcttttttctgggaagggaaagcagaaagctggatcggagcgcttggtctgatggcagtgcttttttcggtcagcggctttgtgatcggaatgaagagttttaaagaaaaaggaaaaaattatcggttcagtgtgatgggggcgatggcaaacggagtgatctccgtgggctggctggcactgatcctgattggattataaaacgagaacaagtaaaaagaaatgtagagggattgcctgtggatgaattagcaaaagaaagatatgatctggctgtggaaaggatccgcgagatccgggaggaaaagacggtggcagagccgtatctggaattttttacaaaaacagccgggtttctcgaagagatgatccgcctgcgcgaccgggtggaagccggagagatgaaaaaactgtccctggaagagctgcgccgggagaatacgcagtgctatcaggatattctgccggagaactatccgacttcctatgcaagtccggattatgcggcaaagatgctgggagaagatctgggtgtactgttaagcttcctgtatacggaacttcgaggtatgatcgtgtatgcctgggaacagaaagaatgggattttctggtaggattggaactgtttttacaggtgtatagtgagtttgagggcggagaagtaccgaccagggaaaacgtgaggaaaatcttatactggtatgtgaacgattactgtcaggaaatggtagaagaacggatacgccaggcggtggatccggctctggattttgcagtaaagatcataaaaggtgcagatctgacggatctgcgttatctgtatcagtttggcgaatatgtgaccgaagaggaagaaaagaccgccgcctttttaaatacattgccggaagaagaaattactgcgatggcgcgcacctatacggaaggctatcggataggctttatcgctaccggcaaagatctgtccagaaagaaaaccgtgaatattcggtatgtgctgggatttgagcggatgatccgtgctgcgattacgcagtttgagcagatgggattacagccggtgatctaccggagtgctgtgcacatggtaaataagggactgcaccggatcggctattacggagcgattccgaatccgcagtttgactatgaccaccgtaacgatattgcactgtatctggatgatgattttgtcagccggaagcttcgggcaacccgcggggcatatgaaacttataaggaactggcgagcgtgcatgccggacctgccgttgtggaaatcttcggagaacggccatttgtaccggagacctgtgaatatgcgatgaagcttacggaaaagcagcagaagttaaaagtgcatatgcaaaatgagattggtcagattacgaaccgctatatcaaaggcgaggagagaagtttcacgatcatcgcctatccggtaccggcgatcggagatcagtttgaagaaatctttcgtgagacggtaaaaatcaatacgttggactataatctgtatcagcagattcagcaaaagctgatcgatgcactggatcttggaacgagtgtgcatattctgggaaaaggtgaaaaccgaacagatctgcgtgtacagctacacaagctggaagatccggaaaaacagacaaattttgaaaactgcgtggcagatgtcaatatcccggtgggagaagtctttacctccccgaaactgacgggaacaaacggaaaactgcatgtaacaaaagtttatctcaatgagctgcagtatcagaatctggaactggtttttacagatggaaagattacagagtatagctgcaccaattttgattccgaagaggaaaataaaaaatatatccgggaaaatattctctatcatcacccgacacttccgatgggtgagtttgcgatcggaaccaacacaacggcataccgggtggcgagagaatatggtatcgaggcgaaacttccgattttgattgcagaaaagacgggaccgcactttgcggtgggggatacctgttacagctgggcggaagatacgaaagtatataatccggatggaaaagaaatcatagcaagagataatgaagtttcaattctgagaaaagaaaatgtgagcaaagcatatttgggctgtcacaccgatatcacgattccgtatgatgaactgggagccatcctggttgagacagcggatggaagagagattccgctgattcaggacggaagatttgttcttgagggaacagaagaactgaataaagagctggacgcactggaaaaataaaaaagtacacagaggataaaaaagcgaccggaaatcagagagaaccttgaaaagttctgagttgatttccggtcgcttttgaaatttgagcaggtaaaaataaaaattgacagaaattacaggcaatgctaatgtaaaagagaaaaaaagcaaaaaacacagtaactattcagtagccactgtaccgcgaagtgttttggcatgaatatgccaaaatcctgagacatacaagccaaaatgccatcaccgaaggtgattttaaatgcattttggctcgtaactgtgaaggtactgaacagttacaaaacacaaaataatacataaatacacaggaaacagcaagaggaggtatcaaaagatgaaagtaggagtcattggatgtggcggaatgggaactactcattatctgtccttaaaagttctgtcttcccagatggatgtggaagtggtcgcactggcagactgccgggaagaatttttacagaaagcagcagcagaatttcccgaagcacggacatatacatatggaatggagctgatcgaacgtgaaaatctggatgcagtacatatctgccttccaagctacctgcatacagagcatgccgtagcagctatgaaaaagggcatgaatgttctggtagaaaaaccggtctgcctgaccagagaagaaggagaactgcttctggagacacagaaagaaacaggagtgaaagtcatggtaggacaggtggtccgtgcctttgacgaataccgctatctgaaagaagtgtacgataacaagacactcggaaagcttaaatcgatcgtgatgcaacgtgtgagcggcaatgtccgctggggatttgagggatggttccatgatgagaaaaagagtggttccgttgtgctggatcttcatatccatgacttggattttttgagatacatgctgggtgagccggatgattttgaagtacgggcaacgacatttgattccggtatgatcaatcaggtaatcaccacctatgagttcggtgatgtatttgctacagcagaaggggtgtgggatgtgtctccgataccgaaattccaggcaggattccgggcgtattttgaaaatggaactgtttactttaatcaggcagggcaaccggggcttgcggtatacaaagctgatggaacagagatcgttcccgagttgcatccggagtatgaggggcagacgaataacggtatcaacatcacgaatctcggaccatattatacagaaatcaaatattttctggaatgtctgcgggatggcaaagaaatcaccctcgcaccgcttcaggaaggcgtaaaatccgtagaacaggcactggaagagtgggaagctgcaaagctgtatcttcgtgagaaaaaagaaatgtatatctgagaacatgcaggagggaacatatgcgggtaggagtgatcgtccgtatggaagcggacacagacattaacgaaaaatttgcggaagtccgtgcgatgggcatggagagctgtcagctggtatgctgggagcggaagattatcaacgatgagaaggcagcagaagcgattctggcggcagctgaaaaacacgggattaccatcagtgcattctggtgtggctggggtggtcgaaaagtctgggatttttatgatggtcagctgaccctgggtctggtcccggcagattaccgggcagaacgggtaaggatgcttctggaaggctctgattttgcaaaaaaactcggtgttaccgattttgtcacccatgtagggtatatgccggaaaatccatatgatacgaactatcagggaacactgaatgtctgtaaggaagtggtagaacggtgtaaaaagaacggacaggtctttttgttcgagaccggacaggagactccggtcacattgaaacgggcgctgcaggatatcgaaaaagatgtgggcgaaggatgcgtgggagtgaatctggatccggcgaatcttttaatgtacggaaaagccaacccggtggatgcgctggaggtcttcggggaatatgtgcgcggcgtccacggaaaagacggaaaatacccgacggacggtcatttccttggagaagaagtgccgatcgggcagggaaaggtcaattatccggtctttatcgaacggttaaaagaagtgggatatgacggagatattaccatcgagagagaaatctcaggagaagaacagaaaaaagatattttggcaggaaaagaatatctggaacaactgatcggataacagagaagaaaagagaacagccggttgagaggttctctttttttgactgttcctggcaattttcatgatttatattgacaagaagtgacagacttagtattattactaataagtagagatgaattaattaaaactacttataagagaaactaataagtatttatgagcaaaggagacaagcaatggctaaagtaggaattgttatgggaagtgattctgacatgccggtgatgagcaaagccgcagcaatgttggaaaaattaggcgtagattacgagatgacgattatttctgcacacagagaaccagatgtattctttgagtatgcgaagagcgcagaggagaaaggatttaaagtaatcattgcaggcgccggtatggctgcccatctgccgggtatgtgtgctgctattttcccgatgccggttatcggtatcccgatgcataccacttctctgggaggcagagattccctgtactcgatcgtacagatgccgaccggtatcccggtggcaaccgtggcaatcaacggaggagccaatgcagcgattctcgcagcgaagattcttgcaacatctgacgatgcgctgctctcccgcctgaaagcatatacacaggaaatgaaagaagaagtagaagcaaaagacgcaaaattaaaagaagtaggatataagaactatacaaaataaaagtgccgcagagcagatggaggatcaagatggattataagaaagctggagtagatattgaagcaggttacaaatccgtagaactgatgaaggaacatgtaaaaagaaccatgagagaagaagttcttggcggacttggcggattttccggtgcattttctctgaaaaagatcaaagagatggaagatccggtactgctgtccggaacagacggatgcggaaccaaagtaaaactggcgatgatcatggacaaacacgataccattggaatcgatgcggttgccatgtgtgtgaatgatattgcctgtgcaggcggagaaccattattcttcctggattacattgcctgcggtaagaactatccggagaagatcgcacagatcgtaagcggtgtggcagaaggatgcgtacagtccgatgcagccctgatcggtggtgagactgcagaacatccgggtctgatgccggaagaggaatacgatctggcaggatttgccgttggtgtctgcgacagaaaagagatgatcaccggcgaaaacctgaaagacggagatgtactgatcggtatggcatccacaggcgtacacagcaacggattttctcttgtaagaaaagttttcgatatgacaaaagaatccctggatacctattatgacgaactgggaaccacactgggagaggctctgctggctcctacaagaatctatgtaaaagcactgaaaaatgtaaaaaatgcaggtgtgaccgtaaaagcatgcagccatatcaccggtggcggattctatgaaaatattccgcgtatgttaaaagacggtgttcacgcagtgatcgaaaaagacagctatccgatccctccgatctttaccctgatggcaaagaaagggaatatcgaagaacagatgatgtacaacacttacaacatgggtatcggtatgatcgttgccgtagatcctgcagatgtggacaagaccatggaagccatgcgtgcagcaggtgatactccgtatgttgtaggtaaaatcacagaaggtgaaaagggagtgaccttatgttaaaaatggcagttctggtatcaggcggcggtaccaatcttcaggcgatcattgacagcataacaaacggaaccatcaccaatgcggagatttccgttgtgatcagtaacaatgcaaatgcctatgcactggaacgggcaagaaaacatggtatcgaagcaagatgcatttcaccaaaacagtatgagacgagagaggcatttaacgaggctcttctggcggctattcagtcctatggtgtagatctggtggtactggcaggatgtctggttgtgattccggagatcatggtaaaagcttatccgaatagaatcatcaacattcatccggcgctgatcccatctttttgcggaaccggctattatggactgaaagttcatgagggtgtgttgaaaagaggcgtaaaagtaaccggagctactgtgcattttgtggatgagggaacggataccggccctatcattctgcagaaagcggtggaggtgaaagagggagataccccggagattctgcagcggagagttatggaagaggcagaatgggtgatcatgccgaaagcgattgatctgattgcaaatgataagatagaggtagttgacggactggtaagatccagataggaggaaaagacatgaaagtactgatcgtagggagcggcggaagagaacatgctatcgcatggaaagtggcacagagtccgaaagttgacaaaatctactgtgcgccgggcaatgcgggaattgaagaatatgcagaatgtgtcaatatcggtgcgatggagtttgacaaactggtggcttttgcaaaagaaaaagagattgatctgaccgttatcggtatggacgatccgctggttggcggcgtggtagatgcttttgaggcagaaggactgcgtgtgttcggaccgagaaaaaatgcagcgattctggaaggttccaaagcattttccaaagatctgatgaaaaaatacaacattccgacagctgcttatgaaaactttactgatccgcaggaagcacttgcttatctggaaactgcaaaattcccgatcgttttaaaagcggacggactggcacttggaaaaggtgtactgatctgcaacacactggaagaagcaaaagacggtgtgaaagagatcatggaagataaaaaattcggcagtgccggcaatacaatggtgattgaagagttcatgaccggtcgtgaggtgtccgttctgacttatgtggatggaaaaaccatcaaaccgatgacttccgcacaggatcacaaacgtgcgaaagacggagatcaggggctgaataccggtggtatgggaactttctctccaagtccgttctataccgaagaagtggatgcattctgtaaggcacacatctatcaggcaacggtagatgcgatggcagcagagggaagagaattcaagggaatcattttcttcggcctgatgctgactgccgatggcccgaaggttctggaatacaatgcccgtttcggtgatccggaggcacaggtcgttcttccgagaatgaagacggatatcgtcgatgtgtttgaagcatgtatcgatggaacactggatcagatcgatctggaattcgaagacaatgcagccgtgtgcgtagttctggcatctgacgggtacccggtatcttatcagaaaggcttcccgatcaaaggactggatgcattcaaagaaaaagaaggttactatgtattccacgcaggaaccgcaaagaaagacggacagatcgtgacaaacggtggtcgtgtgcttggagtagtagctaaaggagacgacctgaaacaggcgagagcgaatgcatataaagctatcgatcttgtagagtttgataataaatattatcgtcatgatattggaaaagcgattgacgaggcataagataaggtaaaaaataacaggggcagaagacgaaagaagaatcgttttctgcccctgttttgaaagataaaaaatcaaccttcttcttcctcaggatatctcatcccccagtctttccggatcgaggtcatcatatccatcacatcgatcgtatagtcgagatgcatccggttttcctctccggcgacagccacttccatatcggccacttcgtattccagcacccggtcggtagaaccgacggataccacttctttgtgaccgtcttccgtataagtgatgatggcttcctcgccccgcggatactcgaacagttcgatgtaagccttatcaaaagagatcgttcctcgttttggctgtttggcatgtagagacaaaatgacggtagccatctcctcctctttgtttttcaacaaaatcgatgcctgctcgtccacaccggtaggtgcgtattttacctgagagagaatctgatccggctttgaggacataaaccagcgaaggaaagacagcgcatacacaccgatatccagcagtgctccgcccgcgagattccggttgaaaaagcggtttttcatgtcatactctttgtaacttccgaagttcatctgcaaaagccgaagttccccgaattccccggtatccatccggctgcgaagttccttgtagattggcatgtggaaaatagtcatggcctcggcaagaactacatgatgttcttcagcgagacgaaccgcttcttccagttcttcagcgttgagggtaatggatttttcacagagtacatgctttccggcacttaaagccttccgaaggtaggaaatatgtgtgttatgcggagtggaaatatagataatgtccacctcatcatccgaaaatacatcgtcaatctgatcataaactttatcaattccatatttttcagcaaaagcaactgccttttcgtgcgtacggtttgctacggaatatagtttccgtccgtttgcagcaaacgcctgtgccagctgattggcgatcacgccacatccgagagtagcccatttatattctttcataacggtgtcctttcttactctttctataagattttgtcatgtatttattatagcgaagagaaaagaagggtgcaagtgggaagtattgtgttgatagtgactgggacggttcagatcattactttgctcctgttcacagtaacattaactttttagaaacacagggaaaatacagaaaacatttgcagaaataacagtacatattacacctggaatacaggtttttgttccacagggtgtgtgcaacggttgtgttcatagggcatcaccctcctttcgtaagatcagagggcatcgaataatcggaaaatcacatcctgctttctattcgattgtacaaatgtagtgtatcatattgcgaacaaatgttcaaatggagagtattcgtatgaatagaataaaaattaaaacattacattttcacccgaaccaacaccgaacaaaaagaccaactggttttatccgccctacagtcaccacaagatatagtaatcccaccacccaaaaccgtgagacagcgtgagaaaaaaatcgtatcattcagacaataaaaaaagcagaaaacctgaataaaatcaaagctttctgcccttttctctgtatgcgggagatgggacttgaacccacacgagcatacacccacaagatccttagtcttgcctgtctgccaattccagcactcccgcgcgctttctttctctgaaagacaagtgatattatatcgttgaaaaacagaaaagtcaacactttttttgaaaaaaacacaaaaaaatttaaaatagacagtcagaggtccgcgcggtataataaagccgacataaacatacgatcccgacagcgaatgtcaggcaccgtttggcaggagggtatcaatgaacgagaaagagaaagtattaacacatctggatattccatattcctatgagctggcaaaacgtatggaagcctaccggtgtaatccggagctgggatatcggtcggcaggatcaaaagcagagtttctgactggcgagatgttaaaaaaagagatggaagagattggtctgtccggggtaacgaaagatgagattaccgtagacggctgggaatttcgtaaagcagttctgtatgtactggatgaaaatggaaagaaacgtgagatccggctgggagcttaccagacaaactgcgtgactgatggggcagaagaatatccgctggtctatgttggaaaaggaacagagttagactataaagacatcgatgtaaagaataaactggtattagttgacattaaccaacgtgacgaatggtggatcaatttcccggtatatcaggcacatctaaaaggtgcaaaagcactgatcgcggtgcagcagggcggctatggcgagatcgatgaagatgcgttaaatgcccaggatattgcaggaccggcagatgctcctgcattttccatatccagaagagatgcccagtggctgaaagaacagctggataatcagcagagccgggagctatgggtgacactggaagcggacagccgggtgatgccggagtgtaaaacttataatattaccggacagatcgagggaaaacacaaagaccgtctgatcgtgctttcggctcattacgattcgtattttgacggatttcaggatgataatacggcggtggccatgatgttcgggatcgcgaaagcattgatcgatgccaggattcagccggacaatacgatcctgatctgtgcgatggcagcagaagagtggggcgtgattgattcggattttgactggtccacaggtgcctacgaacaggtctttaccgcacatccggaatgggtgggaaaagtaatcgccgacctgaactttgaacttccggcgctggcacacggagctggggcgcggatccgaagctgttatgaatatcagccatttttggaacaatttctggaagacctcccggttcttacgagagcgtatccggaggatgcatccgtggtatctccgatcgaaacctggtccgatgacttttcgatggcgatcgcaggaatcccgtccatggtaaatgattttaccggcggaagttttatggagacacactatcactcacagtttgacaacgacgaatactacgatccacaggtctaccagttccatcatgaactgtatgcactgctgattctggcaatcgacgcgacagccgtagtaccactttcctttaccggtgttatgaaacgcgcacaggaaggtctggaactggtaaaatcctgtgaaaacagctgtctggaagaaaaatacgaaacaatcagcaaattgctgaccggagcagaaaaacagcaggaagaaaattaccggtggattatgcagaaaaacagtgcatataaagcgtgcgaagatccggaacaacgggaaacactgtatcagagcctgcgacagacagagacagaacttctgaaacgcttcaaaacagaacaggatgcatttgtccgcattgactggtacggaaatgtattctatccacatgagattttactgagaaatatccaccttttagaaggagccaaaaagaatctcgaagagggagaactttcggtggcactcagaaaactgtatgatgtggataacaatgcctatgcatttatgtttgataaagaagtctacagacattttaccgattatgtgtaccatcagccaaaagaacggctgaagtggggatacagacgtctgatgcagcatgaaaatctgtacgatctggtaaaacagctgctgaaaaaagaagaagcaggagaaaaagactgtcgggaagaggcagcagcacttgcaaaagtaatcgataaacagtacaaaatggcagaacagacaatggaagagatttatcaaaccgtgaaagaacattttgtgcatccgatacaggaacaataagaaaggtgacggggaaacccgctgaaaaatatggaaagcgataagttatatagggtaaaaaaagaagatttacctaagttagaggaacttttaaacatttgttttgcacacgatccgttgtacgagacgctgatcccggatccggatgtgagaaaacgtctgatgccggagctgttccactgcgatatggatgaattctatgaaacatgtgagatttttgcggacagcgaagaacttaacagcgtgctggtggtatccgatgagacggagtcctacaatctgtttcatttcctactgacagaagcgaaggctaccctgcaaaatgatctgtatctgatcaaggaggatccgtcttttcataccttttataattttatcaaaggcggtgactacctgaattcgagctggacacaacagcttcatcagacaaaacgactgcatattatttacctggcggttcatccaaggatgcagcaccacggaatggcagcgctgctgatggatgaagcaatccagtatgcccaggaacatggaatgatgatttcactggaaacacacaacgaaaaaaatctggaattctacaaaaagttccagttcaaagagtatggaatcttaaaaaagaactttaatttgaaacaatactgtctgatccgggaatatcagtaagggtctgctttacaaaacgtgggatctgttatatgatgtataacacacagaaaagagaaagcagggtgaacagatgcagatagaattgctggagatagattttaacagcgaagaagcaatttatatgcagcttcgcaaccagatcatacttggaatcgccacatccagactgcaggacggagataccctcccgtcagtaagacagatggcagaatgtatcggaattaatatgcatacagtaaataaagcgtacgctgttctcagaaaagagggcatcgtatctatagaccggagaaaaggtgcagtgatctgcatcgattcaaacaaactgctggcactggaagaaatgcgtcagaatctgtatatcattctggccaaggggcgatgtcataacatttcccggcaggaagcacatcggctgctggatgaaatctatgatatgtgggagcaatcccccgaagacccgttagaataatctgcgggcaaacaggatacgaaaaatggaggatagaacgctgcatgagtacacaatatacgaatcaggcaaagacagcggtaaaatatgcggaaaagacagcacgcagatacaaacatagttatatcggaaccgaacatttactggcaggtcttttacacgaagaagagggaacggccggtatggttctgcgcgacatgggaatcagtgaagaacggctgatggaaatgatccggaaactgattgcaccggaagagagtaatgtgctgactgcggatcgggcaggatataccccacgggcggcaagaatgctggaaggagctgtggaagaagcagatgatcttcgcagtgaaaagataggaacagaacatcttctgcttgcgatgttgcgggaagttgactgtatgggaacccgtctgctgcacacgatgggagtaaatatccgaaaactgcagaatgaagttctgtcagcgatgggggaagaagttgccaatccaagagataacggcaatgcacgatccagaaatgaagcggctacaggcacgccgacgctggatcagtacagcagagatctgactgagatggctcgtcagggagttatggatccggtggtcggaagagaagatgagattggtcgggtaatccagattttgagccgccggacgaaaaacaatccctgtctgatcggagaaccaggtgttggaaaaacagcggtagtagaaggacttgcccagcgaatcacgcagggactggtgcaggaaaaaatgaaaaacagacggctggttgttctggatctgtccggtatggtggcaggatccaaataccgcggtgaattcgaagaaagaatcaaaaaagtaattgcagaagtgatggaacatccgggaattctgctgttcattgacgaattgcatacaattatcggagcaggcggtgcggaaggagcactggatgcatccaatattttaaaaccttctctttcgagaggagagatccagattatcggtgcgaccacgattgaagaatacagaaaacatatcgaaaaagatgcggcactggaacgaagatttcagccggttacggtagaagaaccgacgcaagagcaggcagttgagattctgaagggattgcgcccttattatgaaaaacatcacggagtcaccattaccgatgaggcgctggaggcagcagtcaagatgtctatccgttatattgcagaccggcatctgccggacaaagccattgatctgatggatgaagcatcttcacgggtacagttaacaggtattacagtgcctccgcagttaaaagaggtagagcagaatctacatgcacttgccgaaaaaaaagaggaagcgatcagggaaggcgatttttcaagagcgcgggagttgcaggaaggacaaaaagagctggaagaatcctacgaaaaattgaaaaaacgtcaggaacagcgttataaaaataaaaaaatgcaggtaaccgaagaaaatattgcccagatcgtatccagctggaccaagattccggtacagaaacttgcccagaaagagtccaaacatctggcaagcctggaaaaagaactgcacaaacgggtgatcggtcaggaagaagcggtggaagcggtggcgaaagcaatcaagcgaggacgcgtgggactgaaagatccggcaaggccgatcggttctttcttgtttctaggaccgaccggtgttggtaagacagaactgtctaaagcactggcagagacagtctttggctccgagcaggcgatgatccgtgtggatatgtcggaatacatggaaaagcacagtgtatcaaaactgatcggctcaccgccgggatacgtgggatatgaagaaggtggtcagctttccgagaagatacggagaaatccatacagtgtaattctattcgatgagattgaaaaagcacatccggatgtatttaacattttattacaggtgctggatgacggtcatatcacagatgcgcagggcagaaaagtggattttaaacagacctgtatcatcatgacatcaaacgccggtgcacagtcaatcgtagaaccaaaacgtcttggattttctcagggagaagacaagaaaaaagactacgaagatatgaaacgcggtgttatggaagaagtgagaagaatctttaagccggaattcttaaatcgtgtcgatgagatcctggtcttccatatgctggataaacaggagattcgccagattgttaacattctggtaaaaaaactggagaaacgatgcaaagaacagctggatatcgaactggttgtccgaaacagtgtaaaagactatctggcagaaaacggatttgacagcaaatatggtgcacgacctctgaaaagagcgatccagaacaaattggaagacaggatggcagaggagatactggatggaaagattcacagaggggatcgggttattgtgtctgtatctaaaaaagttattaaattttcagtcaatgactagatgtttttctgaatttattatataatatctacaaaacaaaagcagcgtcagagatggcggaacgcacagaggaaaactaggaggatattatggctacgattaaagaattgatcagaacagaagcagctggaggaatcagtttcggtaattatgaactggataccaagacgaaactttctgattatgaatatgatggtgacttatataaagtaaaaacctttaaggagattacaaagctggagcgaaacggaatgttcgtatacgaatccgttccgggaaccacagttttagatatgaagatcggaaataacggtatggtattttctgtagaagggacagataatacacagattacagtagagatggaagcggattgcgaatataaagtacttctggatgatgtgagcgttggccatatgaaaaccaatctgggaggaaaattatctttcagcgcagacttatccccggataaagctgtttgtgtggagattgaaaaattataagtgatcaaaagcttgtgatgaaaagctgtcgtcttaccggaaaacggtagggtggcagcttatgttgtgtatgagggtgaacaggagtagtaagagcatggcaaaagcgaagaaaacagtatttttctgtcaggagtgtggatatgaatcaccaaaatggatggggcagtgtccgggatgcaaaagctggaatacatttgtggaagagaccgtgagtccaaaccagacaaaacatcaggaggcaacaggaagaaaaaaagccgaacctgtagcactttccgagatttccctggatgaagaagaccgtatccatacaggtatcaaagaactggatcgggttcttggcggcgggatcgtgcaaggctcgatgacgctggtaggtggtgatccgggtatcggaaaatccacgctccttttgcaggtgtgcagaaatctggcagatcaagtatccgttctttatatctccggtgaggaatcattaaaacagatcaaactgcgggcacagagaatcggtgcgtttggagaccggctgcggctgctgtgtgagaccaatctggacatgatccgccaggtgattgaaaaagaaaaaccaacagtagttgtgatcgactcgatacagactatgtacaacgaagaggtgtcctctgctcctggaagtgtgtcgcaggtaagagaatccacaggggtgctgctgcagatagcaaaaggacttggggtttccatatttatcgttggtcatgtgacaaaggatggaaatgtagcagggccgagagtgctggaacacatggtagatacagtgctttattttgagggcgatcgccatgcatcctaccggattctgcgtggagtaaagaatcgttttggatctaccaatgagatcggtgtctttgagatgcgtgaagaggggctggtggaagtggaaaatccttcggagtttatgctggcgggaagaccagagggagcatccggttccgtagtagcctgctccatggagggaaccagaccgatcctgatagaaatccaggcacttgtatgtgccagcaacttcggcatgccgagaagaacggcagcaggtacggattataacagagttaatcttttgatggccgtactggaaaaacgtctggggcttcatctctcggcaagtgatgcatatgtcaatatcgccgggggaatccgtatgaatgaaccggcggtagatcttggaatactgctggctgtggtatcgagttataaagatatcgtgattgatgataaggtactggtattcggcgaagttggtctgagcggcgaagtacgtgcggtaagcatggcagaacagagagtacaggaagcaaagaaactgggctttacaacggtaatccttccggcagcatgcatgaaaagtgtgggacaggaaacagaaatcgcgctgattccggtggagaacatcagagatgcagttcgttttctggaacagaaaaggtaatgtaagaaacatataaaagaaaatgtaaaaaaatgtaaaaaaatgtaaaaagacagttgacgaaaacagaaataaatgctattatatcagagttacaactgacgaaaacgattgaatcaaagaaatgaaaaaagttcttgacaatatagagtgagttgtgatatgatgcaaaagttgctgctgataagtcgaaaacataaaacgacttcgaaaaaaagttgaaaaagttcttgacaggcaggaaacgacatgatataatggcaaagctgtttgagacaaacggcaatgcaaaaccgatctttgataactgaacagtgaaacacattcctcgaaagttctttttaaaatcataaaaacgaacgatcgaaagatccttaaaaacagtaaaagggataaattagccaagagttgattttgacctggagcaaacatttatttagagagtttgatcctggctcaggatgaacgctggcggcgtgcttaacacatgcaagtcgaacgaagcactttggacagattcttcggatgaagtccttagtgactgagtggcggacgggtgagtaacgcgtgggtaacctgcctcatacagggggataacagttagaaatggctgctaataccgcataagcgcacggtactgcatggtacagtgtgaaaaactccggtggtatgagatggacccgcgttggattagctagttggcagggtaacggcctaccaaggcgacgatccatagccggcctgagagggtggacggccacattgggactgagacacggcccagactcctacgggaggcagcagtggggaatattgcacaatgggggaaaccctgatgcagcgacgccgcgtgagcgaagaagtatttcggtatgtaaagctctatcagcagggaagaaaatgacggtacctgactaagaagccccggctaactacgtgccagcagccgcggtaatacgtagggggcaagcgttatccggatttactgggtgtaaagggagcgtagacggaatggcaagtctgatgtgaaaggccggggctcaaccccgggactgcattggaaactgtcaatctagagtaccggaggggtaagtggaattcctagtgtagcggtgaaatgcgtagatattaggaggaacaccagtggcgaaggcggcttactggacggtaactgacgttgaggctcgaaagcgtggggagcaaacaggattagataccctggtagtccacgccgtaaacgatgaatactaggtgttggggagcaaagctcttcggtgccgcagcaaacgcaataagtattccacctggggagtacgttcgcaagaatgaaactcaaaggaattgacggggacccgcacaagcggtggagcatgtggtttaattcgaagcaacgcgaagaaccttaccaaatcttgacatcgatctgaccggactgtaatgagtcctttcccttcggggacagagaagacaggtggtgcatggttgtcgtcagctcgtgtcgtgagatgttgggttaagtcccgcaacgagcgcaacccttatcctcagtagccagcaagtgaagttgggcactctgtggagactgccagggataacctggaggaaggtggggatgacgtcaaatcatcatgccccttatgatttgggctacacacgtgctacaatggcgtaaacaaagggaagcgatcacgcgagtgtgagcaaatctcaaaaataacgtctcagttcggattgtagtctgcaactcgactacatgaagctggaatcgctagtaatcgcaggtcagcatactgcggtgaatacgttcccgggtcttgtacacaccgcccgtcacaccatgggagtcagtaacacccgaagccggtgacctaaccgaaaggaaggagccgtcgaaggtgggaccgataactggggtgaagtcgtaacaaggtagccgtatcggaaggtgcggctggatcacctcctttctaagggaagacaaagtagatgaatgtgttttactgttgagttatcaatatggaaactcataattggataacgatatttctggcgtcgatgcgcttgggggacacacccgttcccatcccgaacacgacggttaagacccaagaggccgatggtactgcactggagacggtgtgggagagcaggtggatgccagatctacggggatgtagctcagttgggagagcacctgccttgcaagcagggggtcgagagttcgaatctcttcatctccactgtgggcttatagctcagctggttagagcgcacgcctgataagcgtgaggtcggtggttcgagtccacttaagcccatagggttttaagtcatatttttaaagcccataaatctttagtaaaataaagaaaacgttccgtggtgaacatcccgcgaggtgtctgcgaagcagatcccgagttggccaggcgccagccgaaggctgtgcgatctacatgtgagcggagcgaacatgtaccttgaaaactgcatatacgaaataatccaaaaaaacgttaaacgtttagagataggaaaaagagacatccgaggagttatcttttaaggataacgaatcaaaacaataactactcattacattgtaaacacgatgaaatgaaactgcgagagaaccgccagttttaaacgctagtaaaactggaaggtcaaacaagaaagagcgcagggtggatgccttggcactaagagccgatgaaggacgtgataagctgcgaaaagctgcggggaggagcaaatatccattgatccgcaggtatccgaatggggaaacccacctggatagactccaggtatccatacgccaatccataacgtatggaagggaacccggtgaactgaaacatctaagtagccggaggaaaagaaagaaaactcgattcccagagtagcggcgagcgaaatgggaggagcctaaaccagcgtgcgtgcatgctggggttatggactgcataagttaccagaaaggatagtggaatggttttgggaaagccagccagagagggtgaaagccccgtacacgaaatccggaccgggacggcaggatccagagtaccacgagacacgtggaaccttgtgggaagtcggggggaccaccccccaaggctaaatactccttagtgaccgatagcgcatagtactgtgaaggaaaggtgaaaaggaccccgggaggggagtgaaagagaacctgaaaccctgtgtttacaagctgtggaagcaccttatgagtgcgaccgcgtactttttgtagaacggtccggcgagttacgctggctggcgaggttaaacggtagagccgtggagccgaagggaaaccaagtcttaagagggcggaaaagtcagtcagagtagacccgaaaccgggtgatctatccatgtccaggttgaagttgccgtaaaaggcaatggaggaccgaacccacatccgttgaaaagggtggggatgaggtgtggataggggagaaattccaatcgaacccggagatagctggttctcctcgaaatagctttagggctagcctcgatagagtcttgcggaggtagagcactgaatttcctagggggcgtcaaagcttaccgaagaatatcaaactccgaatgccgtgtagatgcttatcgggagtcagactatacgagataagttggatagtcaaaagggaaagagcccagacctccagctaaggtcccaaagtacgtgttaagtggaaaaggatgtgggatttcgaagacaaccaggatgttggctcagaagcagccatacattcaaagagtgcgtaatagctcactggtcgagaggtcctgcgccgaaaatgtccggggctgaaacacgacaccgaagctgaggaatgtctgaagacattggtagaggagcattggatacgcaacgaagcagtaccggaaggagctgtggagtgtatcgaagagagaatgccggaatgagtagcgagagagaggtgggaatcctctcggccgaatatctaaggtttccagggtaaagctgatctgccctgggtaagtcggggcctaaggcgaggacgagagtcgtagccgatggacaacaggttgagattcctgtactgcagtaagacagaactgtggggacacgtgtggagagcataggcgcggaatggaaagccgcgtgcaagcgaggtaggagtcctgtaggaaaaaccgcagggcaatccgaaggcgtgatgcggaccgaaatctagtagggaagtatgtgagccatgcgtcaagaaaagccgctattgttcttattgtacccgtaccgtaaaccgacacaggtggatgaggagagaatcctaaggccgacggaagaagcattgttaaggaactcggcaaaatgaccccgtaacttcgggagaaggggtgccacagaaatgtggccgcagagaataggctcaagcaactgtttagcaaaaacacaggtctatgcaaaaccgaaaggtgaggtatatgggctgacgcctgcccggtgctggaaggttaagaggagaggttagcgcaagcgaagctttgaattgaagccccagtaaacggcggccgtaactataacggtcctaaggtagcgaaattccttgtcgggtaagttccgacccgcacgaaaggcgtaatgatttgagcgctgtctcgacaatgcatccggtgaaattgaagtaccagtgaagatgctggttacctgcgccaggacggaaagaccccatggagctttactccagcttgatactgggattcggtattgcatgtacaggataggtgggaggctatgaatcggtaacgccagttgccgaggagccgttgttgggataccacccttgcagtactgggtttctaaccagcagccgtgacccggctgggggacaatgtcaggtggggagtttgactggggcggtcgcctccgaaagggtatcggaggcgctcaaaggttccctcagaatggttggaaaccattcgaagagtgcaaaggcagaagggagcttgactgcgacaccgacgggtggagcaggtacgaaagtaggacttagtgatccggtggtattaagtgggaatgccatcgctcaacggataaaagctaccctggggataacaggcttatcactcccaagagttcacatcgacggagtggtttggcacctcgatgtcggctcatcgcatcctggggctgtagtaggtcccaagggttgggctgttcgcccattaaagcggtacgcgagctgggttcagaacgtcgtgagacagttcggtccctatccggcgtgggcgtaggatatctgagaggagctgtccttagtacgagaggaccgggatggacggaccgctggtgtacctgttgcagtgccagctgcatggcagggtagccaagtccggaagggataaacgctgaaggcatctaagcgtgaagcccccctcaagatgagatatcccattcgaaagaagtaagaccccttgaagacgacgaggtagatagggcagaggtggaagtgcagtaatgtatggagctgactgttactaatcggtcgagggtttgacctggaacggttgatcgcaaagcagtaggaagaaggatgttacgtgtgtgcagttttgaaggtatataccttcaattaaatataggggattagttcaatggtagagcaccggtctccaaaaccgtcgatgggggttcgaatccctcatcccctgtatagtaagaacaacagatattgttgttctttttttgtattctatatcaatcattgatctagcggacagattttgattgctactgtattgttatatcttgtcattttaactgtgaaattatataataaaaacagcttgtacagtgaatacaaaagaagggggaaggaagagtgaagaagtttatcaaagaatttcgggaatttattaaccgtggaaatgtgatggatatggctgtcggtatcattattggtggtgcttttaccagtatcgtatcttctttggttgatgatatcattaatccgattcttggactgttcggtggtatgaattttgatcagctgaaatggaacattttaggcgaggttactttgaattatggtaagtttatctcagctgtgttgaatttcctgatcatggcactggtaatctttacgattatgagagttatgaatagtgcggctgaaaagctgaatcataacaaagaagaaaaaccggctgcaccgacaacgaagaaatgtccttattgtaagacagagattgccattgatgcaaccagatgtccgcattgtacttcggttttggaagaaaccaaagagacgaaataaaaacaatacatataaatccccggaggatttttctggcagaagatcagattatcttccggggatttttgtattatacaggtatggatattcgggttacaagttggttatcgtgcgctattgccatttagtcatgggtatggtctttgacctgattccaattgttatcgcatggggaacgatcgcactggtgatcgcaacttacacaccggtgtttaactggatttcttatccgatgggattatatatgaagctattcctgatctttatggagagaactttaattgcaattccgttgattgtgctatttgcaaatttgtttttataggttataatgaagtttcggtacaaagaatattgtgccgggactttttttactttacagaaaattgctttcctgtaaagtgaaaaacgctgcgtgaggatgtgccaaggcacattcgttgttctatgaaagaagaaaagaaaacaggggaaagtgagcaaaaatgtgatggactacaagttgttgttggatatggcggtgtttgccggggatatcctgatgaaaaacggggcagagacgtatcgggtggaagatacggtctaccggatcctgcagaaatcgaatctgaagacagtgcaggttctggtgatgatgaccggatttgttgccacgctggatgatccgactatggattcgctgactgttgtgcgaaggatccagagtcatggtacaaatctggagaaaattgaccaagtgaatcagatatccagagaattttgtaatgatgagcttacgctggaacaggcgtttaaacagatgaaggcactgtggaaggaaaaagaaccgccaaagatacggttgctggcatttgcccttctgaccggtggatttgccgtcatgttcggcagtaactgggcggaggcaatcgtggcagccgtagtgggtctggtcggagccgtggtgcagttttcatgtaaaaaaggacatatgcacatgtttgtggagaatatcgtgtgctctctatctgtggcagttgccatcggttttatgacggcggcacttccgggaacatatgatacagaccttctgatcatcagctgtatcatgccttttgttccgggagcggctatcacaaatgcggtctttgatacgctgcatggagattatctttccggacttgcaagggcagctgaagcttttgtgatcgcactggcggttgcaattggtatcggtatgggattgtttgtgatggcagcagtccttggaagatagggggggagaagacgatgacagacatgattatacaaagtatcggcgggattgctgctgtgtacggctttgcaagaatattaggggtaccgaagaagttctatttatgggcgggaatcgatggaggtatcggctggtttgtatatctgctggtgggagcaatgacacattcggagcttctgggagcatttttcggagcagcggtgatatctgtaggcgcaaatgtgtgtgcgagagtatttaagacaccggtgacgatgatattgattcctgcgaatatgacactggttccgggtgcgggaatgtaccggatcgtatatcatattttatatccggagggagagcaggcggcgtattattttcaacagacattactgatggcaggaatgatcgcgattgccatgtttattgttaacattatatggagttcggtaacgggatccatgaaaaaaagaagggattacagaaatgaaaaagtggagtaaaaagaaaaaaggggttgtgatagcagccggagtggcgctacttggtctggcgggcacatacggatatcaggtttcggtatatcagaatcattttctgccgggaaccaggatcaacgagttggactgtggaaaaatgacagcaaaagaagctgaagatgcatacagaaaagaaacagagacctatcaactgacactgacattccggggagatgaaagtgaaaccatagcgggaaaggattttgattatacctatcaggatgatggggaaattgaaagctttttaaaaaaacagaatccgtttttatggatgaaatactggtttgaacagtcagagtatgaactgaaaagagggatcgtctatgatgaaggcaaactggaaaagaagctgaacaatctttcgcatctgtccgaagaatcacaggaagcacctgtggatgcgaaaatcgtttataaagaagatcagtttgtggtcaaaaaggaaaaacagggaacgacgatcgatacggatgcattgggaaaagctgtggagcaggcattgaaagagggggaagaaacactggatgtggaacaggcagacggatatgtgaaacctgcagttaccaaagacagtgaacttcttgcgaagcaaaaaaagcagttaaacgaactggcaaatgtacaggtgacatatgagcttcccgagggagagaaagttctgaatggaaatacggtaaaaaaatggctgaatcttgatgaagatggcaattacagtcttgatcaggataagatgaatgcgaagatcaaaaaatatgttaagaaactggcggaggaagtcgatacgctgggaaaagaaagaccatttcatacgacttcaggactggatgtgactgtgaccggtggaaattacggttggaagatcgatcagaaagcagaaatcaaagttctgaaaaagaatattaaaaaccagcagcaggtgacgagaaagccagagtacagtcagaaagagctgtatacagataaccatggtctgggggatacttacatagaagtcaatctgacggaacagcatctgtattattataaaaagggaaaagtggttctggacaccccgtttgtgtccggaagaatgacaaaagaccggtttactccaccgggagtttatttcctgacatataagcaaaaagacagaatccttcggggacgtcccaatgccagcggacagccaagttatcagtctcatgtaaactactggatgccatttaacggtggaatcgggctgcacgatgcttcctggagatcgagtttcggaggaaaaatctatatttacagcggatctcatggctgtattaacctgccggggaaaaaggcggcgaagatctatgagatgatcgataaggaaacaccgatcgtgtgtgtgtacaataatgggtataaactgcatggataagaagagtctgccgggctgtgaatgaaaatatgaggctgcctgcataaatctgcggacagccttgaatttaaaaaattttttcgaaaatttaaaaaatattaagaagatctcccgggcaatggatggtataatcaggagaaggaacctgaccgaatccataggatgcaaagacaaatggaattcctgcggtttttgttgcgttgaaatcacctagggtatcccccacatatacaggggctttaagatgatactcctgaatgatcttgcagatattatcggctttggcgtttccggtgtctccgggacaaagatgaccttcaaagtaagagccaagaccactggtttccaaaaagacttcgatataaccggcctggcagttgctgacaatgaacagtcgataattttcttttaactgttgcagtgttttttcaagatccggatacagcggtgcacactgcgccagcaaagctttatgttcttcctgacagcaccgatcgataagacgaagctgttcttcttttggataatccgcaaaaagcacgctcgcaatatcgggaagcagacgaccgaaaagtcctttcagtgtagaggcattaatggtaagagaaagactggtttcccgatgaatcacgtcagtccaggctttcgcacagatttccgtggaatcccacagggttccgtcaacatcaaaaataatactgtccatagcaatctcctttatacagtgtaatgagaaatcatctgtagaatctgatgataacagcaggatctgtaaaacacagtcatactgtttacaaaacagataccaatgtatattgtagagtaactattcagtagccactgtaccgcgaggtgttttggcatgaatatgccaaaatcccgagacatacaagccaaaatgccatcaccgaaggtgattataaatgcattttggctcgtaactgtgaaggtactgaacagttacattgtagagagaaaaagagaaaaaagcaagagattgtattgcagagccggcacgaatcaggttactgtttactggtaatatcccgcgaggtgttttgtgtgagcgaaggtcacagaaaacccgagacatatcgcacgaatttatgcgattagcataaattctgtgcatcgcgcagcgtgttgctgggcacagagtgaacagtaaccgaatcagaacagactggaaaataccgatagacttaacgacagagaagaggtaaaatgttagcgaaaattgtagaaccactgatagaatggtatgaagagaatcacagaatcctgccatggagagcttccaaaaatccgtactatatatggatatcggaaattatgctgcagcagacaagggtggaagctgttcgtccgttttttgaacagtttataaaggcactgcccaaggtagaggatgttgcagtctgtccggaggagcagttgctgaagctctgggaaggacttgggtattataaccgggtacggaatatccagaaggcagctgttcgcattgtgaaagaatatgggggaagactcccggctgactatgaaaaattaaaagaacttccggggattggaaattacacagcgggagcggtggcatccatcgcatatgatcttccggtacctgcggtggatggaaatgtccttcgggtgtatgcgagaatcatggaagatgacagtgatatcttaaagcagtcagtaaaaacaaaagtggagaaagaatttttgaaagtgatgcctggcagcagatccggcacatttaaccaggcattgatggaactcggtgctatgatatgtgtaccgaacggtgcaccgaagtgtgtggtgtgtccggtggcagaatactgccaggcaagagtgcatggaacggtactgaatcttccggtgaaaaagaaaagacaggaacggcgaaaagaagaaaaaactgttctggtattacgagacggtgaacgggtggcgattcgaaagcgcccggcgaaggggttgctggcaggaatgtatgaactgccgaatctggaaggatatctgagcgaggaagagattctagcatgggtggagaatcaggatcttataccgcttcagatcgtgccattgattgatgcaaagcatattttttcacatgtggaatgggatatgaaaggatatctgatccgggtggcggcactcgaagaaagcgcagatccgaagatgatttttgcagagatcagtgaagtggaaaaggagtatccgattccggcggcttttcaggcatatgcagaacagattcagatgcgtctgggacaggataaatacagataaaagaagtaataaaacgtaactattcaataaataactgtgaaggaacggaacagttaccgaaaaacatttacagacaaagaaaaggagaacaaaagtgaaaatactgagtgttgcagtaccatgttacaattcacaggaatatatgagaaaatgtgtggattcccttttaaaaggtggagaagatgtagagattctgattgtggatgacggatccaaagatgatacgctaaagatcgcaagagactatgaagagaaatatcccacgattgtaaaggcaatccatcaggaaaacaagggacatggcggagcagtcaatacgggacttgcgcatgctacaggactttactttaaagtggtggacagcgatgactggctgaatgaagaagcacttaaaaaagcacttgaagtcttaaaactatgcgtcagaggaccaaagacactggatcttttgatctgtaattatgtctatgaaaaagtgggagcaaaaagaaagaccgtgatgagatatcgttctgcacttcctcaggataaaatcttcggatgggatgatgtaaagccactgggaaccagccattatctgctgatgcattcgatgatttacaggacagagcttctgtgggaatgtggtctgaaactgccggagcatacattctatgtggataatctggtggcatttattccgctggcgagtgtgcagagcatgtattatctggatgtaaatctgtaccgctactttatcggaagagcagatcagtccgttagtgagagcgtgatgatcggtcgtgtggatcagcagatccgtgtaaataagctgatgatcgattatctgggacaggtaaagaatcttcaccgtaaccagagaggttatatgagacatatgctgatcatgatcatgacggtatccagtattttcctgattcaggcgaagacggatgagtgttttgagaagaagaaagaactatggcggtatctgaaaaccaatgaccgtgcggattatggaaagattcggttgagtctgctgggacgtctttgcaatctgcctggcaaaggaggaagacaggtttcagtaacgggatataaggtggtgcagaagatttacggattcaactaaaaatccgaaatttttattgccaagcatacgacaaaaaggtccggtggaccttttttagtaaaaaaccggtgagtgaaaaagatgttcactcgccggttttttaaagttaatggttaaatttcagaagaaatgaaatttgatttacatatgtgtgtcgtgttgatgaagtggggaacgctgttttatttttgctccctgtttttcggctgctcttgagtagaacagcacatatgttgctacagcacaggtaatacctgttgctacatcagctatagaatgttgttttaagaacatggtggacagaacgatcagtgtggtcagaataaatgaacctgtacggattcctttatgtttctgcagcttcttgcaggtgtggattgcagaaaaggcggccacagaattatatacatgaatgcttggaagtacatttgttggtgtatctgtccgatacaggaactgaaccatacgggtgaaaacagaatcgttggtaaattctgtcggacggatattcagtccgtttggatatacataagatacaattaaaaataatgtcataccgatggcaagattcaaaatcaggctccagaactcggttgtattctcattgaaaaatagaaaatagccgacagtcacagcgatataaataaaccataacaagtatggaataataaaatattcgcagaatggaatcttatcgtccagactggaatcaataatgtgataccgtacatgccggttctcaagataagagaaacaaagcagataaaagacggtataaagtgctaccggaatgacacgtttgatacgggtgcttgtgctcatatgagaaatgcctcctctttattacgcgctaaatttacgatagtagcagctcttcaaaaagctattgtgattatagcacagaagaatttgtaaagcaaaggaaatagagaagaatttggaactttaagaaaaagtttaaaaattattcacagtattcatatattaaatataaaggaatcttttgaaagtttccgaagggttttttattgatttttaaaacacctatgatataatcgatataaagtgaaatgagtgtggcgaaagttccgcacaaaatattatatgattaggagaagtgtctatgaaagccagaaagaaaaaagcggctcagagagcagctaaaagaaccacagaaatgaaagaaaaaattgcaacaaatgcagaacataaaaaggcagaagtagtagactcaacagaaaagacaacaactgcgaaaaacactacaaaaaaagaagtaaaattgccggaggtaaaggctgaaccggaaaaagaagaaaaaatgtcggaaataaaagaggaaccgacagaagagacagaaaaaaagaaagtggaagtgaaaccggaaccggtaaaagaagaggaaaagccggaagttaaggaagagccgataaaaacagaaaaagcagagagcacaaaagtgcaggagcaggagtttgagagacgtatggcacgtcattatgacgaactgaaatggctgtactgtgaactttatgaaaaccggatggatatgtttgaagatctgtgcaaaaatctgaaaaatatttatgcagacagaaaagcagatctgaaaaaacaggacagagtcagagaacaggatccggaatggtataagaaaaatgatattctgggaatgatgatgtatgtcgatgcatttgcaggaaacttaaaaggtgtcaaagagaaactggattatgtacaggaaagtaatgtcaattatctgcatctgatgccacttctggaatctccggaaggaaagagtgatggcggttatgcggtcagtgatttcaggaaagtacagccggaactgggtactatggaagatctggaaagtctggcagacgaatgccggaaaaaaggcatcagtctgtgtatggattttgtaatgaatcatacgtcagaagaacatgagtgggcaaaaagagccagagccggagagcgggaatacatggatcgatattatttctatgataattatgatgtaccgtctcagtttgaacagacggttccgcaggtattccctacaaccgcaccgggtaactttacctggctggatgatatgaaaaaatttgtaatgaccaccttctatccatatcagtgggatctgaattactggaatccggttgttatgaacgaaatggtctataatatgctgaatctgaccaataaaggtatcgacgtgatccgtatcgatgcggttccgtatatctggaaacagctgggaaccaattgcagaaatcttccgcaggtacataatattgttcgtatgatgcgtatgatctgtgagatcgtgtgtccgggtgtactgcttctcggagaagttgtcatggaaccggaaaaagtagtaccttattttggctctgtagaaaaaccggaatgtcatatgctgtataatgtaacaacgatggcaaccacctggaacacggtagcaacgagagatgcccgtctgctgcgtcagcagatggatatcatcaaccgtctgccgaaggactatgtattcctgaattatctgcgttgccatgacgatatcggctgggggctggactatggatggcttggtcagttcggcatcgatgaagtggctcataagaaatatctgagcgatttcttcacaggtaattatgagaactcttttgcaagaggagaactgtataatgcagatccggcttccggagatgcacgtcagtgtggtactacggcgtctctgtgcggtatcgagaaagcagcatatgagaaagacgaagaagcaacaaagagagcaatccgttatgacctgacactgcatgcctatatgctgacgcagtctggtatcccggttatctacagcggcgatgagattggtcaggaaaatgattatacctaccatgaagatccgaagaaatgggaggattcccgttatctgcacagaggagattttcagtgggataaagcggaacttcgtcatacaaaaggtaccattccgggagaaatgtttgaaggactgtcaaagctggagacaatccggaaatcgcatccggtattcgagagtaccgcagactgcagaacagtggatacctgggatgattctatccttggtctgataaaagaaaagaacggagagaaactggtagctctgtttaacttcagcgaatatgataaggttgcatggatcaatgaggaagacggcatgtatgaggatctgatcagcggcagacagatggaagccagaggagtacagatcccggcatttggctgctactggctgctgaaaaaataggtgtcggtatgacaatcagtgaaattgcaaaactggcaggtgtttcaagtgcagcagtttcccgttatttaaatgacgggagcctcagtcaggaaaaacgtcagcgaatcgaaagggtgattcgggagaccaagtaccggccgtcggaatatgccagaacgatgaggacgaaaaagagcaaccggatcggtgttctggttccacagatcgattcagagtcggtgccgaagatattatcaggcatttcagaacgtatggatcagaagaattatcacgtattgctgatgaattcaaatctgagtctggaaaaagagatcgggattctggaaacctttgaacaaagtcaggtggatggattgatttttgtcgcttcagtactgacaaaacgacatgagaaagcactggagcatatgggtgttccggtggtaattcttggacagaaaagtgaaaaatatccatgtatttaccatgatgatgagggagcagcgtgtgccatgatggaagaactgttaaaaagcgggtgcaggcggccggcatatatcggtgtggaccggcgggataaagcagcaggagagaaccgttaccgcggagcctgccatgcactggaaaattcaggcctgcatatggatgaagttccgtatcgggtggctgcgttttccgcacagggtggatatcaggcaatgacagagatgcttgctgacgggaaaaggccggatggcgtgttatgtgcgaccgatatgattgctgcaggtgtattgtcctgcctttctgagcggggaatcacagtgcctggagagatgaaagttgccggtatgggacacggagctattgcggatcttttgtgtccgagactgacaacggtacattatcattatcataccagcggaagggaagcggcagatctgttgctggatctgatggagaaaaagaggagacagcaggaatcgcggatgctggaatatgaggttatcagacaaaaaacaatatagatgttgcttaagcaacaaacaaatagagattcgtaaaattattagcactcatttctgatgagtgctaattttttcttgacatttggaatattcggtattagtattaaagtcagtgaaagaatttggtctttcaaagaaaaaagcagagaacaggagcacagaaaaagacggatgacaggttttctgcaggaaaaggagtgtgtataaccatgggagaaaaacatggaaatctttcaattaacagtgacaatatttttccaatcataaagaaatggctgtattccgaccacgatattttcgttcgtgagctggtatccaacggctgtgatgcaatcacaaaattaaagaaactggagatgatgggagaatacactttcccggatgattacaaaaataaaatagatgtgattgtcaatccggaaaagaaaaccctgaaatttatcgataccggtcttggtatgacagccgatgaagtagaagagtatattacacagattgctttttccggagcaaccaagttcctggagcagtacaaagataaaacgaatgatgatcagatcatcggacattttggtctgggattctattcagcatttatggtagcggatgaggttcatattgataccttatcgtataaggaaggggcaacaccggtacactgggagtgcgacggcggttccgagtacgatatgcaggatggtgacaagacaaccgtcggtacagagatcactctgttcttaaacgaggacaatctggaatttgccaacgaatacagagttcgtgaggtactggaaaaatattgttctttcatgccgactgagattttcctttccaacgagaatgcagaacaggaatatgaaaccattgacgaagcagatctgcgtgacgatgatgtggttgtagaacatattcatgaagatgcaaagaccgaagaaaaagaaaatgaaaacggagagaaagaagttgtagaaatttctcctgcaaaagaaaaagtaaagatcaataaacgtccggtatctatcagtgatattcacccactgtggatgaaacatccgaatgagtgtactgatgaagattacaagacattttaccggaaagtatttatggattataaggagccgctgttctggattcatctgaacatggattatccgtttaacttaaaaggtatcctgtattttcctaagatcaacaccgaatatgattccatcgagggaaccatcaaactgtataacaatcaggtatttattgcggataacatcaaagaagtgattcctgaattcctgatgctgttaaaaggtgtgatcgactgtccggatctgccattgaacgtatctcgaagcgcactgcagaacgatggatttgtcaaaaaaatctctgattatatcagcaagaaagttgctgacaaactgaccggtatgtgcaagacagccagagaagattatgagaaatactgggatgacatcagcccgtttatcaaattcggatgcatcaaagatgcaaaattctctgataagatggataattatatcctgtttaaaaatctggatggcaaatatctgacactgaaagactgcatcgaagaaaataaaaaaccggaagcagaaacagcagaggccgggaaaccggaagaagagaaaaaagacggagaacaagcagaagagaaggagacggaaaaaacaacagtttattatgtatctgacgaaatacagcagagccagtacatcaatatgtttaaagaacagggtatggatgcagtaatcctgaaacataatattgatactgcttttattacccatgtagaacagaaacatgaagatgtaaaattccagcgtatcgatgcagatctgacggaagacttcaaagaagatggcacagatctgaaagaaatgaccgaagagctgacagcaacctttaaaaaagcactgaacaatgaacaactggatgtgaaagtggaaaaactgaaaaatgaaagcatttcttctatgatgactctgtccgaagaaagccgccggatgcaggatatgatgaagatgtatggtatggatgccaatatgttcggcggtgcaaacggagctacactggttctgaatgcaaatcatccgctggtaaaatatgtggctgaacacagagaggacgagacaaatgttccgttaatatgtcagcagctgtatgatctggcaatgatggctcacaaacagctgagtccggatgaaatgacacagttcatcgcaagaagtaaccagattctgcttgcattggcaaaataaaaagaagccggaggtagtggtatgacgattgaagaattaagcagtgtattacagatgcaggaagaaatccttcagttttccagttttaccaatgcagatgcatgggaactgggcaatctgatcgtggcagaggcagcaaaaagaggtgcagcagtactggtacggattcgcttaaacaacggctataccgtattccagtatggtatggatggtaccaatctgtatcatgaacagtggctgacaagaaaagagaacacggtgcggcttaccgaaaaaagcagtctgcggatgtatatggatctgagggagcggggagaaagcctggcagacagatttcttgatgagaaagagtatgcggcctgtggcggcggattcccgattcgtgtggaagaagtgggtgtgatcggaacggttgcaattaccggtctggatcatgtatccgagcacgatcttctggtaaaatgtatcagcaaatatctgcatgtggcagaggtaccgcggattcgcgcaatgtaggaaaacagggaaattctgtcggataaacagaaatatcatgtgaaaaataaaaagatctgaaaaatgtgaaaaagcatttctcagatcttttttgtatcttctgactacgacatcataaaaatacttacgcatgatattccgggaaaaatactgccatatctgcagggagggatgaagtaaactccaggggaactccggtgacagggtgggtaaatgccagccggtaagagtgtagtgcctgacgagccagcagggcagtttccggattgtacagagtatctccgatcagaggatgtccgatggaagtcatatgcacacggatctgatgggtacgtccggtttccagctgcaactgcaccagagaaagaccatcctgtggaacagaaagggttgccgggtaaaaggttttcggatgccagcatttttgcagataatgagtacaggcgggatctcctttgtcaggatccacctgccgtaagatcaaagactgatctgcgcgtccgatcggacggttgatggtaccggcgggatcggtctttccctctgtgatggcaagatagatacggtgaatctcgcgttttttcatctgatcggaaagaatggcaccactcagcatatttttggcgagaatcaggagtccggtggtgtcgcggtccagacggttgatacagcggaagacaaaggggatattttgttgctggaagtaccaggcaactgcatttgccagagtgttttcataattgccgatggaaggatgtaccggcatatctgccggcttatcgatgaccatcagatcttcgtcttcgtagataatatggagcggcaggcagactggaatgatattttccgagggctgttcttcctcgagtgtgatttccagcagatcaccggttttgagcggaaaataaaagagtgcttccttgccgttcagacggacagaaccgggatgctgcttcagccaggtgcggatgtgccgggaatagccgtgatgacacagaaaatcatagatgcgctgctcactgtccggtgcagttattgtataagagaatattcgtttcatatgtggattcctttttaaatattgtattcgaaattatacagagagtgtatcatagaaagaagacaattcgcaagtttctcaagaaagaattgtgaaatagtctgaaatatgataaaataatcaacagatattaaaaaatacacaaatattgcaaagaaaggaaaaaacatcatggaaaaagaaaaatacattgcatatgttggaacttatacacatggaagcagtattggaattcatctgtatgacgtggatgtggaagaaggtacactgagcgagcgaaaagtagtgccggtaaacaattcatcttatgtggtaaaatcgaaaaacggcaagtatctgtattcgattgcagatgaaggtgtggcagtgtttgagatcaaaccggatggtgatctggaactgatcaataaggtgggtattgatggtatgagaggttgttacctgtgcgtggacgatacaggaaaatatctgtttgttgccggatatcatgatggcaagatcacagcagtacatacacaccaggatggccgtctgggtcaggtttttgacggcgtgttccacaaaggagtcggaagtgttgcagaacgtaacttccgtccacatgtcagctgtgtgaagacaacaccggaaggaaaatatgtatgtgcggtagataacggaatcgatcaggtaaagatttaccggatcaatacaacaagaaaccgcatggaactggtggatattcttcgatgcaagagagaatccggaccgagagagatcgtgtttagtaaagacggcaaatatgcgtacattctgttcgaattaattaataaagtgggcgtatttacatataaagatactgataagggaccggaatttgaactgattcagttagtagaaccgctgtccgatcagctggatccgatgcatgactgcggagcagccatgacgatgtcaccggatggaaagtatctgtttacttctacggcaggggataattcagtggctatgttctctattaatccggaggatggaaagctgacgaaggaatttgcactgccgatcagtggggaatatccgaaggatatcgcactgttcccggacggaaagcatctggcggttgtgaatcatgagtccaacagtattacaacgtttgctattgattatgagaagaaattgatcgtgatgaaagggaaaccgatgaaggtggagacgccgaactgtattttgatgacaaatattgaagtagagtaagattggttgaaaaagggaacgcaacaggctccggattttctttgctgcaacgtgggcagggcaactttgaactagccactaactgcgactatattcacttgggtcagctgacccaagcgaaagtctccgtaagtgtcggattttaaagcttgtcctaggcgcccacaaagtgttgctacaaagaaaatccggagcctgttgctggtttttcaatgggtacggttctgacaatcctcaagaactgtttcaagtggaatagttccgataaatactgggaaacatttccaaataaaaaaccgtggcgacattagaatgtacattctttctaatgttatcacggttttttatgtgataagtttatttatcagtatagattttctttacgctatccatcgttgcagtcatattcagaagaagtgcgtcggcgaggacaagggccgtcatggattctacgactactacggcacggggaacaatgatggggtcgtggcggcctttgatggagacagagatgggtttaccctgtttatttacggtgtcctggaaggaggcgatggacggtgtaggtttgatagcggctcgaagaatcaggggactgccatcgctgattccgccaagaactcctccggcgtgattgctggctttccggatggttccgttttcaccaggaaggaacggatcgttgttggaacgaccggtagcggatgctactgccataccgtcaccgatctcaaaagcttttacagcaccaatggagagaattgcttttccaagattagcatccagtttttcgaaaaccggatcaccaaggccggtcggaagaccattcacgatgcattccactatgccaccggaggagttttgctctttcatacagtgcagcagatattcggaagcttcagcggcagcatccgcatcaggcatatacagcttattctgttcaatctgtgtcctgtcaaaggtcttgatggttacgggtccgatagaacgggtataggtagtcagggaaatgccaagtgtggcaagcagtttggatgcgacagctccggccgccacacggccaatggtttcccgaccggaggaacgtccacctccccggtagtcacggaaaccgtatttttcatcaaaagtgtagtcggcatgtcctggacggtaataggaagcgatttccgaataatcacgggaacgctgggaagtgtttcttaccagcatggaaattggtgttccggtggttttgccttcaaaaacaccggacagaatctccacggtatcgtcttcctttcgaggtgtggcaaatttgctctgccccggtttcctacggtttaaaaaaatctgaatatcttcctcacataaaggaagaccggccgggcaaccgtctactacgacacccagtccggcaccatgggattcgccccaggtggtaatacgaaaaatgctaccaaaagatgatccagccataaactctccttattataatggttaaaaaattatcaatagaatcatagaaaaataagcatctttcgctattatatatcagggaagaaaatttgtaaagaaattgacaaacagtagttgacggctttataatgaacttaaattttggcattttatcatggcaaagtgagtgctctgaaaactgctttttgagcaaatgtaaaattaggaaaggaagtgttataaatggaagccgggcctgatcctcgagcggataaaacaaaatatctggatatgccgcccattggaccggaagtactttctgtgtcttagagcgtgcctgaaaaatcatttccgaaatctgcaagccccactttgcggtatattttaccctcattcggttgccgtagcccgctacgccgccctcattcggataaaatctcccacaaactggaactcgcagctcacgaaaagcctttttcagacacgttctggcagtggcaaacatacagaagggagatttataacatggttaagattttcagaaccatagataataatgtacatcagatcaatgaggcacaggagggaagctggatcgcactgatcgatccgacagccaccgagattgtggaaatagcagaaaaatatgatatcgacgtggatcatctgcgggcacctctggatgaggaagaacgttcccgtatcgaagtggaagatcattacacactgattctggtagatattcctatgatcgaagaacgaaatgacaaagaatggtatggaacaatccctatgggtattgtggtgacagacgataagatcttcacagtatgcctggaagataccccggtattaagttctttcatggatggaagggtacggaatttcttcacatataagagaacacgttttatcctgcagattctgtaccgcaacgcatctttgtatctgcattatctgcgaatcatcgacaaaaagagtgatgaagtagaacagaaactgcacaaatcgcagagaaatcaggaactgatagaactgctggagctgcaaaaatctctggtttactttactacatccctgaggtcaaatgaagtggttctggaaaaactgttaaaagtggaaaatatcaagcagtatccggaagatacagaattgctcgaagatgttattatcgagaataaacaggctatcgagatgacaaatatctacagtggtatcttaagtggaacaacagaagcattcgcttcaattatttctaataatctgaatattgttatgaagttcctggcaacagtgacgatcgttatgtcgattccgacgatgatcttcagtgcatatggtatgaacttaaagtctgtcggtatgccttttgcggataatccgatgggatttctcatggtgattctgctttctctggtgttcagtatcctggtagctattgttttccgcaaaaaagacttattctgattgtgagagtacgaagtacggaataatcagaaatcaatgggggcaaaatactttttgactaacatcttaaaaaggagaaaaatatgaattttttgaataaaatggagcgaagattcggcagatatgcactgaccaatttatctttgtatatcgtactgacttatgcggcaggatatctgttgtatatgataactccacaggtacttacctacatgacactggaaccggccatgatcctgcgcggacaggtatggaggattgtcagctggctgctgattccaccgtctacacagaatattttctttatattgatcacattgatgttttactactctatcggaacttctctggagagaacttggggagcgtttcgctataatgtatacatcttctcaggtattctgatgacaatcatcggagcatttatcctgaattttgtactgggcggcaatgttttatttggcggactgttcagcacgtattatattagcatgtctatcttcctggcttatgcggcaacctatccggataaccaggtgctgtttatgatgatcattccattaaaaatcaaatggcttggtgtcgcttatgtgttgatgattctggcagagatgattcagtccggatgggcggtaagagttgcgattatctgttctttgatgaactttattatattttttttcatgacacgaaatatgagccggtataatccgagagagattcacagaagaaaagaatttcaaagagcggttcatcgaagccaggtaaacaacaagggaatcactaaacataaatgtgcaatctgtggaagaacagaaaaagacggagagcatctggaattccgtttctgttccaagtgtaacggcaattatgagtattgccaggaccatctgtttacacatacgcacataagatagggaggcatactttatgaaaaaaacgaaaattatctgcactatgggaccgaacacggatgacgaagagatgatgcgaaaactggttaaagcaggtatggacgtcgccagattcaatttttctcacggagatcatgaagaacagaaaatcagaatggatctgttaaaaaaagtacgaaaagaactgaagttgcctatcgctatattactggacaccaaaggaccggagatccgtaccggtattctggaaggcggacagaaagtatatctggaagaaggaagccggtttacactgacaacggaacagatagagggaaataacactcgttgcagtcagacctataaaaatcttccaaaggatgtaaaagtgggagatacgatcctgatcgatgacggactgattcagctgactgttgagaacgtaacagataccgatgtagtctgtcgggttgtcaatggtggagaactgggtcagaaaaaaggaatcaatgttccgaatgtagaagtgaaacttccggcgatcactgagcaggataagaaagatattctgttcggtatcgaacagggaattgactttatcgctgcttctttcgtaagaaatgcagaagcaatcaaagagattaaagaactgcttcgtgcaaacggtggagagcggatcgatgttatcgccaagattgaaaatgcagagggcgtacataatatcgacaagatcattaaagctgcggacggcgtgatggttgccagaggcgatctgggtgtggaaatcccggcacataaggttccacatatccagaaaatgatcatccgcaaatgtaatgaatcctacaaaccggttatcactgccacacagatgctcgactccatgatgcgtgcaccacgcccgaccagagcagaggtaactgacgttgcaaatgccatctacgatggaactgatgccatcatgttatccggtgagaccgcaatgggaaaatatccggaacaggcggtacagatgatggtgaaaatcgcggaatctaccgagccgtatatgacacacaaacgttttctggactaccgtgcgctgcggggcaataaaaatgtttccagtgcggttggtgtggcagcagtacagaccacagaaaatctgggagcagactgtatagtaacacctacgatttccggacagaccgcccgtctgatctctaacttcagaccgaaagtgccgatttatgccgtaagtccgaatgagtgggccagaagaaagatgcagatctactggggagtcacttccgtagcaggttatgaagaagattccacagagaatatcatttcacatgctatgtatattgtgagaagagaaaatctggtgaagaaaggtgacattgtggtatttaccgcgggagatccggctaccaatatggtaaacggggaaggtgcagtgaccaatatcatgcaggttattcaggcaaaataatgtaacagaacacaacagaggagattatgaaaaaatgaacaagaaaccatttgtaacaaaggaacagttggatgagattaccgcaaaatttccaaccccttatcatctgtatgatgaaaaaggtatccgggacaatgcaaaagcagtaaaagaagctttcgcatggaacaaagggtacagagagtattttgcggtgaaagcatgcccgaacccgacactgattcagatcatgaaagaatatggatgtggatgtgactgttcctccatgaccgaactgatgctttctaaggcgatgggatgcaagggagctgatattatgttctcttccaatgccacaccggcagaggaatatcagtatgcagcaaaactgggagcaatcatcaacctggatgatattacccatattgattttctggaaaaagctatcggatatattccggagaccatcagttgccgttacaatccgggtggactctttaaaatcagcaatgatatcatggataacccgggagatgcaaaatacggtatgaccacagaacagctctttgaagcatttaagatcctgaaagcaaaaggagcaaagaaattcggtattcatgcattcctggcaagcaacactgtaaccaatgagtactatccgatgctggcaaaagtattgtttgaagttgctgtaaaactggaaaaagagacaggggctgatattgaatttatcaatctttccggtggcgtgggaattccttacaagccggatcaggagccgaatgatatccgtgtaatcggagaaggagtgcggaaagtatacgaagaagtgctggttccggcaggaatgggtgacgtggcactgtatacggagatgggacgttttatgacaggaccttatggatgcctggttacgaaagcgattcatgaaaaacacacatataaagagtatattggctgtgatgcctgcgcagtaaatctgatgcgtcctgcaatgtacggagcatatcatcacattacggtcatgggaaaagaagatcagccatgtgatcataagtatgatatcacaggatctctttgtgaaaataatgacaaatttgccatcgaccggatgcttccgaagatcgatatgggagattatctggtaatccatgacactggtgcacatggttatgcgatgggttacaattataacggcaaactgaaatcagcggaaatcctgttgaaagaagacggcagttttgagatgatccgccgggcagagactccaagagactattttgcaacactggattgtttcccgatttataataaaatttttgaataaggagacaggagctgtcgcatgagtgatcgtgctatggctccttttacatacttatggaaaatctgttcttttgtttaaacgccacgctgccgatcttttttacaatgattctgggatatggatttcgtaagatcggactgctggatgaaggttttataaagaaaatcaaccgatttgtcttccgggcggcgttgcctctgctgctgctggaagatctctggagtgcagactttcagacactgtgggacggaaaatttgtcggcttctgtgcggctatcacgattggcggcggactggtcagtgtcctgtgttccagactggtgaaggatgagaatatccgtggagagtttgctcaggcggcgtttcgaagtaattctgcactgctgggaatcgcatttatcagtaatatttacggaaaatccgatatggcttctctgatgctgattggaaatgtcccgtttaataatattctggctgtgatcattttgctttttatgaaaccggatggggaaaagaaggcagcaggaaatctggcaaaagagactgtaaaaggaattctgaccaatccgatcattctcggtatcgccggaggaatgcttctgtctgtctgccatgtgccacaggtgacgatcgtcagcaagacagtgcacaatctgaccagtctggccacaccgcttggtctcatggcgatgggtggctcctttgagggagagaaagcaatcggtcagatccggtcggcacttggtgcaacgtttttgcgactggcaggaattgccatgattgccctgccgcttgcagccctgagcggattacgaaacgaacagatggtaggagcacttgtagtggcaggttcttcttccgcagtcagttgttttattatggcaaaaaatatgggacacgaaggaacgcttacctcgagtgtggtcatgcttactacgctgggaagtgcttttactatgacagcatggctgtatgtgctgcgttgcttcggtctggtgtaggagtgtaacatggagaatctgatattcagtctgaatgccacagtgccaatcttttttacgatgatcctgggatttgtcttccggaaagtggggctgatggatgaagaatttaccaataaagcgaataagtttgtttttcaggcggcactgccggccctgttgttttccgatctttcccaggcaaactttcgggacgtgtggaacggtacctttgtggcatactgcgcactgacaacgatgatctgtatcgtgatctcgattttgatttcctgtctgtggaaagacaaaagtatccagggagaatttgttcagggggcttatcggagcagcgctgcaatccttggtattgcatttatccagaatatatatggaacatcaggcatggcgccattgatgatcattgcttcggtgccgatttataatgtgatggccgttgtggtactggcttttctgaaaccggagagagaaagactggacggaacactgataaagaagactttaaaagggattgcaaccaatccgattattcttggaatccttgcaggggtgatctggtcaggatgtaaacttccctgtccgccgattcttatcaagacagtagataatctgggaaaactggcaactccactgggattgatggcgatgggcgctgcgttcgatgcaaaaaaagcattcggaaagatcaaaccggcggttactgctacggtattgaaactggtggtctggtgtgcggtatttctgccggttgctgtgatgcttggattccggcagaaggaactgatcgccattcttgtaatgcttggttctgccacaacggtaagttcttatgtcatggcaagaaatatgggacatgagggggtactggcgtcgagcattgtgatgttgacgacatttttcagcggattcacactgacattctggctgtacctgcttcgcagtatgggactgatctgatgagagagtatatggtaaacatgatggcggaaacaacatgtgaaaacgggacagccggagacaggaacagtgcttaaaaagcagatagaatacatatacaggagaacaaaaagaatgaaaagtgaagttgtgattctttcctgcgaaagttatgaggaagaactggtttacagcacactgaaaaagggaatagctttactagggggatgggaaactttcttgaaaaaagaagaaaagattctgctgaaaccaaatctggtacgaaaaacggaagtggagcgggcagtcattacccatccggcagtggtcaaaggtatcgtaagactgttgaaagaagaaggctatgtgcatctgaactgcggggattcctgcggtgtggggtcagcgaagaaagtcatggaaggcaccggcatggatcagatgctggaagattatggtgtcacgatcgttgattttaatgagggaagtacggtatcttatccgcagggacacacggcaaaagaattctttctggcgaaaccggtgcaggaaacggatgcgctgatcaatctttgtaagatgaagacacatgctctcgaacgagtaaccggcggggtgaaaaatctgtatggctgcatcagcggactccataaagccaaagggcataccaaatatacgaatgcagacatttttgcaagacagctgatcgatctgaatcagctgatcaaaccgcggttttgcgtgatggacgggatcgtggcgatggatggaaacggaccgacttccggagatccggtgaagatgaaagtgctgcttctgggcaatgatccggtggccatcgacagtgtatattgtcatctggtacatcttgatccacagatggttccgacaaatgtacatggagagacgatgggacttggtacctggagggaagaaaatatccggctgttaacggacggtggtgagatcacgatgcaggaggcagtggaacgtttcggaaatccggatttcaatgtagaccgtaaaaagcagagagagaatctgtggaaccggtttaataacagttttttacgatattttcagaaaaaaccgtatatagaagcagacaagtgcaaaaaatgtggagtctgtgtggaagcctgtccggtggagggaaaagccttgcaatttaaaaacggcagaagaaagccgccggtttataactatcataaatgtatccggtgtttctgctgtcaggaaatgtgtccacacaaagcgattcaggtaaaataaatttgcgatgaatcgtgattaatggtataatgtagtcgctaattgtcgatattgcttacccgaaggggataaagttcatataaagaagggagattgttatgaaaaagcttgaagaatatgtgagaagtattccggattttccggaaccgggaattatttttcgtgatgtaaccagtatcttgcaggacgcagacggactgcagctggcaatcgattccattcaggaaaaactcaaggatgtggacgtggatgtgattgcaggtactgagtcgagaggttttattttcggtgtgccggtggcatataatttacataagccgtttgtacccatacggaaaaaaggaaaactgccgtgtgagacgatttcccaggattatgatcttgagtatggaagtgcaacgatagagatgcataaagattctgtgaaacctggacagaaagttgttctgatcgacgatctggttgctaccggcggcaccatagaggcagcagcaaagatggtggaacgtctgggcggcgaagtcgttaaaattgtatttttgatggaacttgcaggcttaaagggcagagaacgactgaaagagtatgatgtggaatctgtcatctgttacgagggtaaataaacaaaaacaggcggtgaatctatggaagatggaaaaataaaaacggaagaggaacggatgcaggagatcgaggcggtagaggccaatgtaaaatgtatgaaagattttacgagtccggaacagctgtatgaagaattaatccgcagtattcgcaaatatcatccgtccaccgatatttctatgattaaaaaggcctatcagactgcttctaaagcacatgaaggtcagaaaagaaagtctggggaaccttatattattcatccgctgtgcgtggcgatcattctggcagatctggagttggataaagaaacaattgttgccggacttttacatgatgtagtggaagatacggtgatgacgacagaagacctcactcgtgaatttggcagtgaggtagcacttctggtagatggcgttactaaactgggtcagctgaattattctgcggacaaggtggaggtgcaggcggaaaacttaagaaaaatgtttctcgccatggcaaaggatatccgtgtgattctggtaaaactggcagacagactgcataatatgcgtaccgcacagtactggtcggcaccaaagcagaaagaaaaagccagagaaaccatggatatttatgcgccgatagcacagcgtcttggtatttccaagatcaagattgaactggatgacctttctttaaaatatctgaaaccggaagtgtattatgatcttgtggaaaagatcaatctccgaaaaggagaacgggaggcctttgtgcagtctattgtggatgaggtcaaaacccgcatggaagaggcagatatcgaagcagaagtcaatggacgtgtaaagcatttcttcagtatttataaaaagatggtcaatcaggacaagacactggatcagatttatgatctgtttgcggtacgtatcattgtagatacggtaaaagactgttatgctgccctcggtgtgatccacgaaatgtatacaccgattccgggaagattcaaagattacatcgccatgccgaaaccaaatatgtatcagtcgcttcatacgactctgatcggaccgaaaggacgtccttttgagatccagattcgaacatttgagatgcatcgtactgcggaatatggtattgcagctcactggaagtataaagaggcttcggatggtaaaaaaccggtagaacagcaggaagaagaaaagttaagctggcttcgtcagatccttgaatggcagcgggatatgtcggataataaagagttcctgagcctgttaaaaagcgatctggatctgtttaacgaaaatgtctattgtttcagtccggcgggagatgtgaaaacccttccacgtggttccagcaccgtagattttgcatacagtgtgcacagtgctgtgggaaataaaatggttggagccagagtcaacggaaaactggttccgatcgaatatgaaatcaaaaatggtgaccgtgtggaaattatcacatcacagaattccaaaggaccaagccgtgactggttaaaaattgtaaagagtacacaggcaaaaaataagatcaatcagtggttcaagcaggagcggaaagaggataatatcctcaagggaaaagagatgcttgcaaattatgccaaattaaaaggcagaacactgggagaactgaccaagccgaaatatctggaagctgtgatgcgaaaatacggattccgtgactgggaaagtgtacttgccgcgctgggacatggaggcttaaaagagggacagattctcaataagctgattgaagcatatgagaaagaacataaaaaagagattaccgatgagaaagttctggaggcagctgcggaagcaaaagaaaaactgccgatcgtaaaaaaagagaaaggtggcatcgtcgtaaaaggtatcgacgatgtagcggtacgatttgcaaaatgctgcagtcccattcccggggatgagattgtcggttttgtaacgagaggccgtggagttacgattcacagaacagactgtgtaaacgtcatgaatctttctgaatcagaacgtgtgcgtttgatcgatgcggagtggcagggcagtaatctgaccagtggactttatacggcagaaatcaatgtgtatgccaataacagaacaggtctgctggtggatatctcgaagatctttacagagcgcaagattgatctgacaacgatcaacagccggaccagcaaacaggggcgtgcgacgatatccatgacttttgatgtacacagtacggaagaactgaacagtattgtagaaaagatccgtcaggtagagagcgtaattgatattgaacgtactaccggctgacagaaggggtaatccggaaatatgaagaaagcaatgatcgaacagctggtactgggaatggtaggaaccaatacctggctgatcaaaaataaagaaagcaatgagctgctgatcatcgatccggcggatgagagtgcacggattgaagaaaaaattgaccgaatgggaggaataccggtggcggttctcctgacacacggacattttgatcatatgctggcagcagatgatctgcgggacgaatacggtattccgattatcgcatgtgcagccgaacaacaggtgcttacagattccataaagaatctgtccggaagctgggcaagtgcacatgtcctgctggcagatcagtggatctgcgatggaaaaaaactggaacttgccggattttccatcgaagttttccatacaccgggacatacagcgggaagttgctgttattatctgccggaagaagaaattctgttttccggtgataccttatttgcacagagtgtgggaagaaccgattttcccacaggaagcggcacagatatgcaggcgagtgtaaagcggctgttaaaagaacttccggagacgacaagagtctgtccgggacacaacgaagaaacaacaataggatatgaaaagaggtataatccttttgcttaataatattgcaattcgatttaataaaaaagattttgaatatgatgtatattctctggtgaaagccttttatcctcaggcacagatcacgatgttttatgagggagaggaagaagcagagggagagtacgggatgtttctcctggttgcctatggcagtcaggagatttgtctggctgtggaaagagatggtacagagattttcagacaacaggtggctgtagaatatgaaaaggatcgtccggaaacgaaaaatgtgctgaaacgtctggtgtatggtgcactttgtcaggtgaccggaagaacgcttccctggggagacctcaccggaatccggccgaccaagattccgatgaaacttctggaagaaggctggaaaaatacagagattgcccggtatatgagggaaacatatggggtaagcaatgaaaaaactgccctggcgatcacgattgccaacagggagaaggcactgttacaggatctggattatgaaaacggatacagcctctatgtgggaattcctttttgcccgagcatctgtctgtactgctcctttggttctcatccgctggaacggtggacaaaacgtgtagacgaatatctggatacactgtgtaaggaactgacttttatccgggaacagatgggaacaagaaagctgacaacggtatatatcggaggcggtacaccgacgacactggagccggagcagctacgcagactgctttctcacattcaggaaacgtttgattttacctgggtaaaagaatatacagtggaagccggacgaccggacagtattacaagagaaaaactgcaggtgatgaaagaatttcccgtgacaagaatctccgtgaatccacagaccatgaatcagaaaaccctggatgtgattggaagaaaacatacagtggaagatacagtcaacattttccatatggcaagagaactggaatttgacaatatcaatatggatctgatcatcggtcttccgggcgagggaaaagaagaagtcgcacatacgctgcaggaggtagaaaaactgcatccggacagcctgacgattcattccctggcactgaaacgggcgacgagactgaacctgtttaaggataaatacgaagaaatgtcctttgagaacagcaaggagatcatggaaatgacccagcagtgtgccggaaatatgggtatgggtccgtattatctgtatcgtcagaagaatattgcgggaaattttgaaaatgtaggttacgcagaggttgacaaagcgggaatatacaatatactgattatggaagaaaaacagaccattcttgcggcgggtgcgggagcgtctaccaaatttgtgtttgagcatggaacccggatcgaacgggtggagaatgtaaaagatgtgaataattatattctccggatagatgagatgctggaacgcaaaagagtgggaatacagaaatatctgaacgggtgacaccaaatagaaacatgcggaggaaaaggatgattgcggtgaataagtatgtcaatcggcagcatctgttacaatacagcctagatgaacagctgatacatggaatgcgggtcagcaatcttgcgtatcaggtggcaaaagaactgggagaaccggaagaattctgtcatgaccttgcggtggcggggatgcttcacgatattggaaaagaagcagtctcaggggatctggatgatatggatgccccactgatcgtggaggaaattcattacgtcagacttcatgcacaggcgagttatgagatacttaagaaagaagggtacaaagagaccattcttcttgcagtgcgccatcaccatgaaaattatgatggcagcggttatcctgataatctctcaggagaagcgattccgctgggagcccgtatcatccgtgtctgtgatgtatatgcggcactgacttcagaccggccgtaccgtcaggcttttgaaagccagtcggcggttcagctgatgatcgaagagataaaagattttgatgtaaaggtatttcttgcctttcaaagaatgattcataagaataaggaaaaggagattacattatggcattaaagaaaaaacctgtgacaggtatgaaagacatcctgccagcagagatggcaatccgtgattatgtgattcgactgataaaggaaacttacggtacgtttggattctcatctattgagactccatgcgtggaacatattgaaaacctgtccagtaagcagggtggagaaaacgagaaactgatcttcaagattttaaaaagaggagaaaaattgaaactggatactgctgaaacagaggcagacctggtggacggaggactgcgttatgatctgacacttcctctttccagatattattccaaccatgccaacgaactgccgtcgccgttcaaggctctgcagatgggaaatgtatggcgtgcagaccgtccgcagagaggacgctaccgtcagtttatgcagtgtgatatcgatattctcggtgagccgactaacctggcagaaatcgaactgatcctggcaactacaacgctgcttgggaaactggattttaagaactttaccatccgtatcaacgacagaagaattctgaaggccatggctgcttacagcggatttgcaccggaatcttatgacactgtctttattattcttgacaagatggataagatcggtctggaaggtgtccgggaagaactggaaaaagaaggatttgacaaagcttgcgtagataaatatcttgccatgttcgaagaaatcaccaatgatgtacagggcgtacgttatgtaaaagaaaagctggaaggtgtgctggaaccggaatatgcagacggtcttgaactgatcatgaacagtgtggacgctgtgaaagccgcagactttaagattgcgtttgatccgaccttggtacgtggtatgtcttattataccggaccgatcttcgagatttccatggatgaatttggcggaagcgtcggcggtggcggacgttacgatgagatgatcggcaaattcacaggaaataacacctgtgcatgcggattctctatcggattcgagcgcatcatcatgctgctgatggaacgtggtttccagattccacagatcggaacaaagaaagcacttctgattgagaaaaatatgccggcagagggcatgatgaaagttctgaaacaggcagaagaagaccggaaaaacggatctgttgttacgattgcggttatgaagaaaaacaaaaagttccagaaggaacagctcaaagaagagggatacgaagaaatcgtagaattctttgcagacagaatgtaattggtgtgaaaacacactgttacgaatagagtgttaatattggaggaagaaacaatggcagaatcaatgaaagggttaaaacggacccatcgctgtaccgagatttccacagcaaatatcggagaaaacgtaacactgatgggatgggtacagaagagcagaaataaaggcggtattattttcgtagatttaagagaccgttccggtatcgtacagctgatttttgaaaatggcagcatcgatgagaaaggattcgaaaaagcaacgaaactgagaagtgagtttgttattgcagtgaccggtgtggtagaagcacgttccggtgcggtaaacaataacttaaagaccggtgagatcgaagtgcgtgcaaacagtctgcgtattcttgcagaggcagaaacaccgccgttcccgattgaagaaaacagcaagacaaaagaagatctgcgtctgaaatatcgttttctggatctgagaagaccggatattcagagaaacctgatgatgcgttctcaggtaacaacactgacccgtcagtttatggcaaatgagggatttttggagattgaaactccgatgctgacaaagagtacaccggaaggcgcaagagattacctggttccgagccgtatccatccgggaaacttttacgcactgccacagtctccacagctgttcaaacagctgctgatgtgctccggttatgaccgttatatccagattgcacgttgtttccgtgatgaggaccttcgtgcagaccggcagccggaatttacgcagattgatatggagctgtcttttgtagatgtggacgatgtgattgatgtaaatgaacgtctgctggcgtacctgttcaaacaggtactggatgtggatgtgaaactgccgatccagaggatgacctggcaggatgcgatggatcgttttggctctgacaaaccagatctgcgttttggtatggaactgcagaatgtatctgaggttgtccgcggatgtgaatttgctgtatttaagaatgcactggaagcgggtggaactgtccgtggtatcaatgccaagggacagggcggtatgccgagaaagaaaattgacaaactggttgagtttgcaaaagactatggtgcaaagggtctggcttatatcgccattcatgaagacggaactgtaaaatcttctttcgcaaaattcatgacagaagacgagatgagccgtctggtagaagccatggacggacaggctggtgatcttctgctgtttgctgctgataaaaataaagttgtctgggatgtactgggtgcactgcgtctggaactggcgcgtcagatgaatcttctggacagcagtgaatatcgttttgtatggatcacagaattccctctgctggagtggtctgatgaggaaaaccgtttcaaagcgatgcatcatccatttaccatgccgatggaagaggatctgcagtatatcgacagcgatcctggtcgtgtacgtgcaaaagcttatgatattgtactgaacggtactgagatcggtggcggtagtgtgcgtatccatcaggacgatattcaggagaaaatgtttgaggttcttggattttccaaggaaaaagcttacgaacagtttggtttcctgctgacagcattcaagtatggtgttccgcctcacgccggtctggcttatggtctggatcgtctggttatgctgatggcaaaacaggagagtatccgtgatgtaattgcattcccgaaggtgaaggatgcctcctgtctgatgacagaggcaccgaatctggtggatgagaaacagctggaggaactggggattgcgattcgcagcgaggaataattaaatagagtttcttgccagatttttggcagagggacgcggcaggctccgggtttcctttgtcgcaacgtgggcagggcaactttaagctagccactaacttcggctatgttcacgagggtcagctgaccctcgcgaaagcctgcgtaagtgtcggatcttaaagcttgccctaagcgcccacaaagtgttgcgacaaaggaaacccggagcctgccgctgtgttttggcaaaaaaacggatggtggatattgaagattatggcagagagagggaatcgctgagtagaaggagcgattctgaaaagggaaaatatggggaaagataaataaaagcaggtgcgaagaagaatataatctttgcatctgctttttgctgtgttgtatcaattgattcagtggctcaagtttgagtgttctgaatccgaagaaagttgccggtggcagcttaggcaggtgatgtcagatatcagctttccggctgtgtgagaatagtggtgagggcttcttccaggtttccaaggagggcggttgtgatttcgtcgcttttggggatgcgccagtttttgccgtcgttgttcaggtggatggttacaggggtggtgatggtttgagtgctggtggcgatacagtctgtcaggagagcgatggcgtgggactgacggccttcggttccgtcttccaaagcctgggaggacgccaggtaggcggtgtattgttcctgataggagtatacaacagaagaaaaatcacaactggtcagattcagatctacagaggcatccataccgtcatcagacaggagttccgacgtgatggagtagtccaggcagttcagaagctgactggcgatggctttgacaacggaacggctcgaagtatcttcggaattgaagagggagtccagtgccagataacggtttaattgttcggtgtcgaaagctttcagagtatccaggtggatcgcgatgatctcagagggagaaaacagggaagcatcggccacgtaagtggaaaagtttccggttactgcagcagacaggcttttcggggaatcaatgttccaggtttttccggatcgggtgagggtgatcgtatagtcagaggtgatgcttttataatcattgtttttcaaaacattgccaagaagcagatagcagtcttccagagaaaaatctacggaagcaggacttgcagagttctgaatctgtttgatcattacctgacgggagtattcttttgccagtgcttcaccgtcaggtgtggtaagggaaacagtaaccgaagctgaatttccctgttccgagaaatctctgatatgatatgaaaaatcatgaaagaaatcagcaaatacagaggtgatatcggaaggtacggattgtttagtgtcagcagacgggaaaacatcatggacattaagtgtttttacaatgtcagattccttctggacggacagagaggagagttcgtgacgaactactttgacaggatcctgccggtatggcgtacgattgctgatggtataaaaacacagacatccggcgatcagttccacaatgagaatcataggaatcccgattcggaaagaaggatgcagggttttgtgatgaaatacatacatgccgatgagacaaccgacacttccaccaaggatagcgattgcaaacagtgcggattcccgaatccgccatttatgatggatagctttgtatttgtcgatgccaaaagcggcaaagccggtcagattgataacggccagataagaaagaataccggtaagtgtcataagaacctcctaatatatataaattgtaactgttcagtaccttcacagttacgagccaaaatacatttaaaatcaccttcggtgatagcattttggcttgtatgtctcgggattttggcatattcatgccaaaacacctcgcggtacagtggctattgaatagttatctaaaattatatatgtctttttgactatctttttatatcttcttaaatgtccgcaaagccttattttatcggctctacgggcattttgcttttgtggtaaacctcacatatctaggtctatcttcttatattttcgctatcaagcgtggttaaaatcgtggtaaatacttcttatgcgattagacgctgaacctctgattttgcagtatctatggacgcatgagcataccagttcattgtaatactgatatttgaatgccccatgatatactgtaaatctttcgggttcatattcttgcttgccagccttgtacagaacgtatggcgtagtgtatgcggtgtgatatgtggcaatgggttgtccttatggttcttattgtatttttttaccatacggacaaaaagcatagtgtaatcaatggcaactttgggcttgcctttgtgattgacaaataagaagttgccccgtccgtctatcacaaatggttctgcctttgggcgtttcttcataacccgttgaaatgcctgtatcgtttctctgcttaatggtacttgccttgttccgctttttgtcttaggcgtttcaatgtaatagccctgttccttgctttttaataactggtggtcgataatcacaacttcattttggaaatcaatatcggctactgtcagtccgcacagttccgagatacgaagtcctgtctttaacagtatcagcacatcatcataatacttgtgatacacattgtccgtcttgatgaatgagagtagggcttgttcctgttcctctgtcaatgcgactttctctttggtatcattttctaggacttcactcaacttgaaatcaaaagggtttttccttacgcagtcgtcttgtatggcgatatagaacgacgcttttaacgagcgtttatggttgttaatggtgttataggaaaagcctttatctttcatgcgtaatgcccattctttagcgtcagagggttttatcgtatcaatgctcctagcacctaacttgtcctctttcaataaccgcatgagctgttcccgttgtttctgtgtgcttttcttcacgtttgccctctgtacgttctgtttggcataaagttggcaaagcgtcattttcttgcctgtgctgtcgataccgtcctcaatatcccgtcttatctgctgttccagttcacgaagtgaggatttttcccgttttccctttggtgtcgggtctgtgggtgtcaatctccaagcatacacatattttgtgtttccaaatgcgtctacatatttatataagtattttccgtctgttcgttggctctctccagtatgcaggatacgacctttgctatcccgtcttttttctttcatggtgtctgctcctttccttgttggaaagagccttgatatgacttgtgttcatcataacacatacaaggctcatttgcattagattgcgtccaatttatcaataacctgttcaaactgtcggcgtttaatctgtatgcggttgccattcataatgagccagccagcgtccttgttttcctctgccaagcgtcttaacttgttttctccgatacggaaatactttgacgcttcttcaatggtaagggtgtatttttcccatacaggaatatcgttgttattcatcagatgccccctttcccatgtttcgtgtcatactggatataggggataaggtcggtgcggtctatcctctgtaagtgggcggttaatttactggaaagggaagtgctgtatcttgccttatcgagcatagttcccactttttccagtccgcctaatgcgtcatgttcttctaagaagtaaaaacttttgacagcggaaatcacgccaccctctgtaagccattgctgtgtttcctcaagggaattatgtagtttcggcacttgcagtttcaagacttccacagcccctaaaaagcgttcccaaaaccgacacgttttccatctgctcttattgctttcatttctgtttggcacgacaaagcgtaggttgtttgccaatagcccgaaagccagttccccaagttcaagtggtctgtctttgaatgtcatggcaaaaacatgagccttatcatcacgcagttgcatttctgtccgtttccaactgccgacttcatcaagcgtcttatcatgttttgaacagacttccttatccttatcataaaagcggtaggacaatcccgattttccagcaccgatataaacggtttttgcggtatcgaaatcgtcaaacttgctttcgtcgaagtggtagccctcactattcgagataaattcctctttttcgcattttttctttatctgctctatggtaaagaatggcttttcgttcttatcatcaatggcaatatcaagtcttgtgaaatggaagttatcccgtccgtatcttcgctcacaacgtcggaacatatctccaaaggtataattcctactgtcgagaatacggaaaatatcatcacaacctctgccagtcataacaagataacagcctagcccctgtgggttgtcctctgtctttcttgcgtcccccgatacataaatatctccaatctgccagcgtgcttgataagtcttgaattttatcgttgctggatacacattgaaaatatcagtcggtaaatctaaaatgtgcatgattacatcttcagcggttgcggtatcaaatacaatgctgatgtaatcaatcttaacggataaatttttgtgtgtagttatagtgcattgctcctttcgtatgccccgttttttgcggggtaaaaattgtgttttttcctttatttatcacagtttctaggtactatgacatgtatacgcagggcggtgttacatatacgccctttacgaacgcctaaaggcgttccctttcttcctgtgtctgccccgttcttaacgctcacgagccttgtaaggctcgtggctaaacggaacagccccagtcagaaaccttattttcggtctgatagtccatgcttattcatgctatcaaagtgaaaatatatattttatatgcttactcaagcgtgtgattgaccctagcgtgcttaatcactctgtctaatacgataataactccattagaattacttgtcaagaagtttttgttgacttttagatatagattaagtatgatatgcttataaataccaagaaaagcaacgaaaggagcgattatactaagttatggagcattatgaaaagaaaatcagtttcttaggagaaaacatacagaccataagaaaacacagaggaatgaaacaacaggaacttgcggacaaaatcggtatcaatatgcagagcctttccaagattgaacgtggcgtgaattatcctacctttgatacgttagagaagataatggacgtgctgggtgtaacgcccaatgaattattgtcgggagaatggaagtatattgaccacaccgagccctatatcatggatattatcaaacgggaacaagacttcaatgtttccttagattacctgtctgaaaatgaatttttcgatgatgaaaaagaatgcacattttacaaggcatataaactcatacagtatatccataactacattaccaatgaggttacggagttggaagaacttatggaaatcaagcagttgatacagcgtcaaaaactggaacgcatgataaaagtgcataaggaaatgcgagggttagaccgatacagagaacagcccaaagagtataaataccatgacccttatgatgattggatatttcgtcagcttgcggatatagacaacagaaacaacattcccgacacttctccacaagtagacttcaatgaagcagactatgaagattatctaaaggcgaaatggaacagaggtctttaatttcctcttgcatggaagatacagcaaacaaaaagcccagtaaagagtgcaaagcaccaccaatggtggcaaggctcttgacagggctttttcttttctgttgtggggtaatcaagaggaagaaagaaaaagtgtgcatttttgttccataaatgctaagggtatgctgatttttattgtggcggatatatggaactgttataatatggatatgaagaaagcgacaaatttgaaagtgttaataattttcaaacagcctcattgcatggaaataagaaacagactatccttaaagtaggaggtggcacaaatggcaaatgaagataaaaaagattttaatgctatgttgcatgatagtaaggatatgccaaaatttcaaattatcatagaccagaaaagtattgagaaatatggtggaaacaaaatgtattttgctcccccgattgactatgacaaagtaatgaaaaaagttccgtatggtaaagtgattacggttggaaaaatacgagaacactttgcaaaattgagtggtgcagattttacagagccgattacagcgggtatatttgtttctattgtagcgtgggcgagttatcagcgttccgaagatgaaacaccctattggagaacattaaaagcaaacggagaattaaatgctaaatatccaaatggtattgaagcacagaaagaaaaattagaagcagagggacataccattattcaaaaggggcgtaaaaatatacgatactatgtaaaggactatgaaaattctctttttgatttgaaataggcaaattctatttcacaatttcatatctctatacacaaagcagttagtcttaggattgactgcttttttcatacctaaatttcagattggagtgatgaaatggtgtttgttagagctgttcaataagattatcggtgcataaaattttattgtggtgcagatatgaaaatgatataatgtggatatgaagaaacggacaaattagaatttggagtgaaacagaatgattataataatcgaaaccgtaattttatgtatcgcgttttttctaatatgtttttggggaacaggtacagataacaaaaatttaaaaagctattcatcttatccagatgaagtgcaaaatcgaataaagagtattgcagaatatcaaggaaaatttaaggaaagcaataaagtggttacatttagccaaaataattcatatatatatatgttgacaacaagctgcttttgtatataatattatataaaagggggggaatgtttatgttacatagcatgcgtattcgataagcattgaaatcaaaaaagatttttcccattttcaatatgggcttttttgtcatgcttattttgcgtatgctatacaacaaaactaacgacgtatagacatagtataaaaactatgccttaattttgttgtagtattatatgtataaatgcaggtcaatgctcatgttgagaattgacctgcatttttttgcgcaaaaggagaaatattatgcttgaaaaatattggataaaatgtccaatttgtaacggaaagacgagggttcaagtattttataatacggtattaagaaattttcctcttttctgccctaaatgtaaattaacgcatatcgttgatgttgaaaaactagaaatcataatcaaaaactctgaaaaacaaactttttaattttgaaaaggaaggatatttaaatgaaacacttacctaaaagtacacctacggaaatattgaatgacccatacggatttacttacaaagaaatgtcggaagtaattggagaggataaagcaagagccttatatacggaattgtataaacagccatttcacaaagaaaatctatcaatatcaacaaaaaaagtctataaaagtagcgatactgaaaagtatgtttatgaattgaaagataacaggtatattgaaacggtttttattaaacggcgagatggtgggactgtttgcgtaagtacgcaagttggttgttctgttggctgtattttttgtgagtccggacgcaatggttttgttcgtaatctaacaccgtctgaaattgtgcagcaggttgtattgatacgtcaaaaagtaaatcgtatcgtttttatgggaatgggagaacctttattcaattacgacaacttgattgcagcaatccatattcttcgagatagaaatggacttaactttccaaccgacggcattaccgtatcaacagttggtccagttaatcaattaaaaaaattgcgcgaagaacatctaaaaattcagttgacaatatctttacatgcagcaacacaggctgcgagaaactgtatcattcctcatatgcacatgtacgctattgaagatgttgttaagcaagcattgtcctattctcaaaggcataatcgaaaagtggtatttgcgtatttgcttttaccaggtataaatgaccgttcctcagatataaggcaacttgcaaaatggtttaagggcaaaaatgttatgattaacgtgctgcaatacaacccgacgagtaattcaaaaattagagcaccacaaaaacaagaaatggttgcgttcaaacatcaattagagcaaacaggacttgaagttaccatgagagtttctcatggtagagagattaaagcagcttgtggacagttagctaatacatataataaagccaaaaaacaacagaaataatttaattaaaagagccagacgcacagacgcagagccgataatatgcagtttgaaatactgctgttatcggctcttttttgattttaatttgtgcccctaataaccatattggagcaaaatcagaactgttgcttgtcgttctttgatttccgcagcagctttgaaaaatcaaagccgccgtttctttttatcttctaatgaaatgacgcggtatcactgttaaaagcggcggctaaaggaggtagccgccatgaagcacataccctatcgacaaaatccgacggtcattgacacatcaaaaaaagcccgcccaccaccggggaaaattacgcttgtatatatgaactgtctaatcatctaaatactgcttacaatacctatgcgcctgtccgggcttttcggacgggcgcattttgctgctcaaaaaattttttgaagaaatttatatccaattttctgttatttctgttcgtactatttatattagggttgtttatcaaagaaaatggcttcacacataattttctttgtttaagtattataggacagggattgaatatctttgacttatttattgtagaccttttatggtggcggaatacaaagcgtgttcgtttaagaaaaatgccagaaaaggaattgtatcaaaatccgaaaaagcatatagaagcgtttatcagagcctttattatgtatctgctaattgctctgatagacggatatatattgacacttttataggaatagatataagtaaatcccagtttgacaatttcatatccatacacacaaagcagttagtcttaggattgactgctttttaaaaagacaccatttaggtgtaatgatgtcttttgggtgttattttataggtcatatcaaggctcattcaatcgtggtaaattcgtggtaaaatgagttttttctatacttcaaaatacttgaaagtatagtgtttatgcggataatcgaaaattagatataaaatttatctaaaagcattgtattttcagaaaataccggaatcgcggtaacagatttaatataacagaaccaggaaaaatgtcaactccgggggcaggggaaaatggcaagaaaagaatatcggaagctactattcactggtaatatcccgcgaggtgttttttgtgagcaaaggtcacagaaaacccgagacatatcgcgcgaatttatgcgattagcataaattctgtgcatcgcgcagcgtgttgctgggcacggagtgaacagtaactatcggaaatgtccatagaaatgtaaagaaaaagtaaggaagagcagaatgcactatgatatactgaaaccatgagaacctatcagatacaggaggcagacatgaagaaaaagaaaattattcttaccggagcagctgttgcagccgttgtggtaatcggaatcggtgcgtggacattgttcggcagaaaatcatcggatggaagtacggaaaatgtagtatatgtaaacagcgtagataatctgatgaatccgggaagtggtaacggggcagtgaatcgctttgccggtgtggtagaaacacagaaacaggtggacattcagcagagtcaggataaaacagtaaaagatatttatgtggaagtcggacaggaagtatccaagggagatccgctattctcttatgatacagaaaaatcacaggaagacctggaaaaagcaaagctggagctggagcggatcgataacaatatcggaaataaacaaaatgagattgctgcactggaaaaggaaaaaaagagtgcaggaaatgatgcacagcttgactatacaatgcagatccagagtgcccagatggaactgaaacagagcgaatatgaaaagaaaagcaaacaggtggagattcagaaattacaggactccatcgagaactgtcaggttaccagtgagattgatggtgtagtcaaatccatcaataacggaaatcaggacagtaattcttattcaggagacagccaggcattcatgtccataattgcaatgggagattttcgaattaaatgtaaggtaaacgaacagaatatcgcatctgtaacgccggggcaggctgtaatcgtacattccagagtagatgattctgtcacctggaaaggaacgatgggtgcggtagataaggaaaatccgggcaacgattccaataatggctattatttcagcagcggtgacggatccacccagtccaattcctatccgttctatatcgaactggattcttctgaggggctgatgcttggacagcatgtttatgtggaagccgattatggacagagtgaggaaaaggcgggtatctggctggatgaatctttcatctgtgatgcagatacggacagtccatatgtttgggttgacgatggaaaaggcaaactggagaaacgttctgtgacgcttggacagcatgatgatgaacttttccagtatgagattgcagatggactgagtaaagatgataggatcacttatccggaagacggattaaaagaaggtatgaagactgcagtgggaagcaacggtcagatggggcagagcaacccggtgacggatggttccgacagtgatctttctaatgagaatatgggtggagtggattccggagagatgaatcaggaagatctcacagaagacgggatgcagcagaatgagtcaaatgctgatggcagcgaagatgtcatcggaggaacggaggatgcacagtgattcttgagttaaaagatatctgcaaagattatattcaggggaaaatggtgattccggttctgaaacatattgatttccagatggaacagggagaatatgtggccattatgggaccttccggttccggtaagacaacgctgatgaatattgtaggatgtctggatcaggcgacttccggccagctttttctggacgggcaggatatcagcaaatgtacggaaaatgaaatgtcggatctgagactgaaaaagattgggtttgttttccagaactttcagctgttgtcgagacagactgcattggaaaatgtggaactgccactgacttatgcgggagttgcgaaaaaagagcggagggaacgggcactgcaggcactgacccgtgtaggactggaagacagagtgaattttcagccgaatcagctttccggtgggcaaaaacagagagtagcgattgccagagcactggttaaccagccgaagatccttctggcggatgagccgaccggcgcactggacagtacttctggagaacaggttatggaactgtttcagagcctgaacgatgaaggagtaagcgtattgatgatcacccatgacagtgagattgcagcgaaagcacagagaaaagtaattatccgcgacggcataatgaaaaaggaggagcagccatgaagaaaaaatggattgcggcttttattgctgcaggagtactactgcttggaggggtgactgtatatgcggtgaaaacaagcagtcagagtacggtaaaggtggtatcagtcagtgacatgtcaggtggcggtggatggtccgacaacagtctgtcaggaaatattacttcagatgtatcgcagaatatttatctggcagattcacagaaagtaaagaaaatatatgtaaaagaaggggatacggtaaaggtcggcgatgatctgctcacgtatgatatgaccctggagaatctggatctggaaatgaaaaaactggaaaaacagggaatcgaactgaacatagagaaagcaaacagggaaattacaaaattaaagaatacaaaaccgtccagtgataacggcaatgaagatccgggattggatataccggaaaatccgggcgaggaaccggaggatccgtccatggagccggaagagccggcagaggcttatcaggagcttacagcggaggcagaaccgtatatgggagagggaacggtggaagaaccgtatcattttctgtgtgctgctgacggtgcgattctgggaagttttttaaaccgaatggcagaggaacagtgtttctttgtgattgagatccgggagggcgatgtaagcaatggagaactgttaaaaatctggggacagaagattacggaagatgattttcaggtagcggatactgaccggtttcaggtaaatcttgaaaaagaaacagatgacagtgatggtcaactgccggaggatctgaaagcagcagcggttcttgaaaaaggagccagtgcctatcagggagatggaacagagaaaaaaccactgacctatctggtgaaaaaagatggtattgtaaaaggaagtttttttctggaaagaaaagaagacggaaagtatttccgtatcgaggttcgggaagaaaatggtgatcttataaaggcgtgggaacagaacggagcagatggggattttgcagcggatgtaaaagaggacggggaatatctggtggatctgagcaaaaagcaaagtggagagacaccgggagagccagctgaaccgaccgatccaagtgagccaacaaagccgggagaaagtccggagccacctgaaccatcgaatccggaagaaaagccaaccgaaccatcggtatcgccggaagttactcccggagagaacccggaaccgacaccggaagacggcactcctcaggaaacggcagaacaggaaaataccgtggatggaatgagcacaaagaaaagccgtgcctccattcgctatctgacagttaccagcgtaatgggaagtggaagcagaaaagtgatctctaccgatactgtttctgatacgacaggatccggtgatgcaggaacttcttatggaggaacagctgcagagattcagcagcagatcaaggataaagaaaaagaaatcagggattatcagctggatattaaagagaccaatcttgagattaaagatatccagaaaaagctgaataaccagacaattaagagtacattaaatggtgtggtgaaaacagtcggtgatcccgaaaaagaaagcaacgatggaaaaccgctgattcaggtggtcagcagtgaaggactttatgtgcagggaacggtcagtgaatctaaaatgaataaactgaaagtgggagctacactgagcggatacagttatgacaatggtgtcagctttaccgcagaagtacgggaaatttctccgtatccatccgataacggacaggacggagccaatgcatcttcctatccatttaccgcatacattgcagatgcaagcggacttagtaataacagctgggcagaacttacgctgctggatgagggcgacggacagggacaaggaatctatctggagaaaccttttgtgcggacagaaaacggtcagtattacgttatgaaggacgacggaaccggacatctgacaaaacagatagtacaggttggcggtattcagtatggatccagttatcagattacaggcggtctgagtatggatgataagatcacatttccttatggaaaagatgtcagagagggtgcaaagacagaagaaggtacgcttgatgacctttataactattaacggcagatgggaggaacaacaatgctagaaaatatcagattggcctttcgggggatatggtctcataagatgcggtcttttttgaccatgctggggattattataggtatcgcttccatcatttccatcgcatctacgattcagggaaccaacgagcagatcaaacagaatctgatcggtgcaggaaacaacaatgtggatgtacggctttaccagggagaaagtgagtactggatggacaatggtctgccggataatatttccgtgatttccgatgaacagaaagaacagattcgcagtcttgaaggggttgagagtgcgactttttataaccgcagagggtatgcggacggaatcacctatcggaacaccagcctggacagtggaagtgtgtacggtgtggatgcggagtttctgaaaacaaaaggttatgtaatacaaaatggaagggattttgtagaacgcgactttaaagagtttcggaaagtggtgctgcttgacgatgtggcagtgcagaccttatttccgggagataatccggtgggaaaaaccatagaactccgtggggaaccatttaccgtgatcggttgtatccgcaagtcagatgctttcgaaccggtgatcaacagtctggaagattactatacgtataatcagaataccaacggaatcgtgctgattccggacagtacctggccggttgtttataattatgatgagccggaagaagtcagcgtgatggctagtgagacagacctgatgagctctgtaggaaaaaaagtggaggacattatgaatcaggcggtaaccggacagaccggttccggtatgattgattctgaagaggaaatgatggacggtgccggcagcagtggtgctgacagtggcaatgtctcttataaggcggcagatctgttgaaaacagttaagaacctgcagaaagtcagtgaaaataccaacaaacagctgctttggatcgcaagcatctctcttctggtcggaggtatcggtgttatgaatattatgcttgtatccgttacggaacgtaccagtgagatcggtctgaaaaaagcaatcggagcgagaaaaaacaggatcctgtggcagtttcttacagaagctgctgtgctgaccagtatcggaggggttcttggagtaatcgccggagtgatcctgtcacaggtgatatcgaagatgtctcagactccggtggcgatcagcgtacctgtcagtgtactggctgtagtattttctatggcaatcggtattatcttcggtttgcttccatccattaaggcagcaaatctgaatccaatcgatgcacttcgtcacgagtagaaaaaggatacgagtgttcagaattaaattaagaaaaatattagaaattattcacgcgaaattcaccatatcggatggaaaatgggttatactggtaacggaaaactgaaatgaaagggaagggaagaatgtccggtcatttcaaaaaaagatttctatgggggatttatagtaaatgaacattttatttttcttaacaccaaaaaatgaagttgcctatgtggaaaatgatgacactctgcgtcaggtacttgaaaaaattgaatatcacaaatatactgctattccgatgttaaataagaacggaaaatatgtgggaactgtaacagagggagatttgctccggtatatcaaggaaaaatggtttctgaatatccgggaagcggaggattgcagcatcagcagagtacctctccgatggaagtaccagacagtggatattaactgtaacatggaggatctggtggatacggccatgaagcagaactttgttccggtactggatgatgcggataattttattggtattgtccgcagaagtgatattttgaaatactgttataaacaaagcaaagcaggaagacaaaaacaggaagaagcatagcagatgaaagacagaagtgatccgtggaataaaaacaaacaatcgcttctgtctttctttatgtgggcggggaatctggagcgtgtctgcataaaaacagttgatagaggagcagacagggtgaattcttttagttgaccagcctgtgtgcccgtgataagatataatgagcgttagcgagtgggaacaaacgaagtttgttcatcgggagcggcgaatggcgatcatgatagctgcgaaagcagcgtcaagcaccgaaggtgcgaatcatgatataatgtaacgattctaacaaaggagttttaggaaagtatgaaaacaataatcgaattgatttccaatgaagtaatgaccgcttttaaagaagccggttatgatgaaaatatgggaaaggttacgctgtcgaatcggccggacctgtgtgaatatcagtgtaatggtgctatggcaggtgcaaaagtatatcataaagccccgatcatgatcgccaatgatgtagtggcaaaacttgccgacagcaaagtgctcgagatggcagaagctgttaatccgggattcattaatctgaaagtatccggagtatatatggcgcagtatctggaagagatgagaaacagtgagaaaatgggtgtggaagaagcaaagaatccacagaccatgattcttgactacggtggaccaaacgttgcaaaaccacttcatgtcggacatctgcgttctgcaatcatcggtgagagtatcaagagaatgggaagatatctgggacataaagttatcggtgatgttcatctgggagactggggactgcagatgggtctgatcatcacagaactgcataaaagaaaaccggaactggtatatttccaggaagattacgaaggagaatatccgacagaagctccatttaccatcagtgagctggaagaaatttatccggcagccagtggaaaatcaaaagaagatgaatcgtataaagcagaagctctggaagcaacccatcagttgcagatgggtaacagaggatatcgtgcattatggaaacatattttgcaggtatcggttactgacctgaagaaaaactacgcaaaccttaacgtagactttgatctgtggaacggagaatctgatgtacaggataccattgcaccgatggtacagaagctgaaggatcagggactggcttatgaagaccagggtgcggttgtcgtagatgtaaaagaagagacggataccaaagaggtacctccgtgtatgatcttaaaatcggatggtgctgctttgtatacaaccacagaccttgctactatcgtggaacgtatggaaaaatacaatccggatgagatcatgtatgtggtagacaaacgtcaggagatgcattttgttcaggtattccgctgtgcccaaaaagcaggtatggtaaaagatgataccaaactgacgttccttggttttggtaccatgaacggaaaagacgggaaaccgttcaagacaagagaaggcggtgtgatgcgtctggaaaatctgattcgtgatatcaacgaagagatgtataaaaaaatcgtggacaaccgcagcatcaaagaagaagatgcaagagcgactgcaaaaatcgtaggactttctgcaatcaaatacggagacctgtccaaccaggcatccaaagattatatttttgatattgaaagatttacatcttttgaaggaaataccggtccgtatattttgtatacaaccgttcgtatcaaatctatcctgaacagatataaagaagaaagcggcaatctggataccctgaagattctggcggcaggaagtgacagtgagaaagcgctgatgctggaagcatccaaattcaatcaggtgatcacgaatgcttatgaagagagagcaccgcataaaatctgttcttatatttatgaacttgcaaatgcatttaaccgcttctatcatgaaacaaagattctggctgaagaggatcaggagaagaaagaatcctatctggctttgctgatgctggtaaaaaatattctggaagcatgtatcgatatgctgggatttgaagcaccggaaagaatgtaagcgtgatttccggaaggaggagcgattatgaaaaaaccttcaggaaccagagtgaacatcatgatcatgggaattgtggtcgtggtgcttgccctgggtcttgcagccatcctgggatatggaaaagccagaaagcagatggaacagatgcaacaggcacaacaggaacaggaggcaaaagaagcgcagataacaccgacgcagacggtgacaccggagcctacggatgatccgacagatccagcagtacagaaaaagaatctgatcacggagatcaaaaaggcggtagaacataatgatgtaaaaattatgaccgcagatctccggtatacgtcacaggaaggtcaggtagaagcatatacgcaggaagatgtggcagctgttttgctgcatctgaaaaagaacgagaaagattaccaggcttttgtggaaaaactgcaggatgagagtgttacagtaggagaagaagagggaatacagtaccttcttctgacagattcaaatctcaggaaaatgaccgggacagaagaaccggcagaaaccgtagaggcggagattgtcacaccgacaccgactcccgaaggcaatggcaggaaaattgccattgatgcaggccatcaggcacatggaaacagtgaacaggagccaattgggccgggggcgtctcagacaaaagcaaaagtggcatccggaacgaccggaagaacaacaggagtaacggaatatcagctgaatctggatgtggcactgaagcttcgcgatgagctggaagcaaggggatacgaagtctatatgatccgggaaaccaatgatgtggatatcagtaatgcggagcgggcacagcttgcagcggaatcgggttcagatattctgattcgcatccatgccaatgggtcggataatacctctgtagcaggagctctgacaatggcacctagtacggctaacccatatctgagtcaggaaatgattgctgaatgtcagaaactgtcacagtgtatcatcactgcgttttgtgcttccacaggggcaaataatcagggtgtgtatcagaccgatgagatgagtgggctgaactggtgcagtattcctgcaaccattgttgagatgggatatatgaccaatcaggaggaagatacccggatgcagacagcagattatcaacagcagatggtgacggggatagcagatggaattgatcagtactttgcgtcctgagaataagaaaaagtgacagaaaaaagaaaggggaaatgccaaatgaaaaaactgaaaatgatcggtatgctattcgtaatgctgtttctggtaggaattcttccgacaaaagctcatgcagaaggctgggtacaggaagaaaacggaagctggtattatctgaaccaggcaggagaaaaggcgaaggaaacctggatcggcaattattatgtggatgaaaatggtgtctggatcgaaggaaaaacacaggcaaaaaatgagtggatcagcagcggtggtcgttggtggtatcgtcacagtgacggaggatataccagatcaggctgggaacagatcaacggaacctggtattattttgacggtgcaggatggatggagaccggctgggtgaacgtgggaggaacctggtattatctgaacggaagcggagcgatggtaaccggctggctgaaacttggaaatacctggtattatttgaacggaagcggagcgatggcaaccggctgggtgaatgtgggaggaacctggtactacatgaacggaagcggagcgatggtaaccggctggctgaaacttggaaatacctggtattatctgaacggaagcggagcgatggtgacaggctggctgaatctgggaggaacctggtattatctgaacggaagcggagcgatggcaaccggttggctgaatctgggaggaacctggtattatctgaacggaagcggagcgatggcaacgggctggctgaatctgggaggaacctggtattatctgacaggaagtggagccatggcggcaaacacctggatcggaagttattacgttaatggaagcggagcctgggtacctggtcagacaaccggcacgacaacaggtggaggttccaaaaacaaaattattgccattgatgcaggtcaccagagaaaaggaaacagtgcaaaagagccgatcggtcccggagcatctcagaaaaagcctaaagttgcatccggaactcatggaaatgcatccggactaaacgagtatgagttgacacttcaggtttctttgaaactgagagatgagcttcaggcacgtggatatcaggtttatatgatacgcgagacacatgatgtcaatatcagcaatgcagaacgcgcacagatggcagccaatcagggagcagatattctggttcgtatccatgccaatggctctgataatacatccgttgcaggagcactgacgatggcaccgtccaacaacaatccgtatctgggaaaaagtgtgatcagtgccagccagacactgtcaagaaaaatagtagactatttctgtgcagctacaggagctaaaaaccagggtgtaatgcagacggataccatgagtggcatcaactggagctctattccggtgagtatcgttgaaatgggatacatgaccaatcgtacagaagatctgaatatggcaagcacttcttatcagacaaaaatggtacagggtatcgctaatggtatcgatgcttattatggagcataagtaattatccggcaggtattattctgcggggtgttttgactcggaactgcgaaggtaatgagcagttccgagcataaaagaaaagagagcaggacgtaactatgtcacaagtaatattatttgacctggatggaacattgacagagtccggagagggcattattaactgtgtgcagtatgcactggaaaaactgggaaaaaaagaagaacatccggaaaatctgcagtgttttatcggtcctcctttaaaagaacagtttatgaaatatgcaggtctcggcgaggaagagggagaaaaggcagttgtatattaccgggaacggtatactacaacgggaatatttgaaaaccgtctgtatccgaagattccggaattactggaacttctgaaaattaataataagatccttgctgtggcatcgtctaaaccggaggtctacgtaaaacagattctggagcattttcagattgcagattattttactgcgattgtgggaagtgaacttgacggaagaagaacggagaaggcggaggttattgaagaggctttacggcggatgcatctggaagaagaacgggacaaggttcttatggtaggcgatcggagtcacgatgtacagggtgccataagctgtggtctgcaatgtatcggggttgcctacggatacggaagccgggaagaactggaaaaagcaggtgctgtctatatcgcagacagtgtggaagatctgggaatccttgccagtccgaacgatgaagaaaccacagaaaatgttgaatctgtgcggaatattattccggacagagaaaaagtgaagaaatatgaaataccggagacacggaaactgggaaaagaagaaaaagaaatgccggaacctgcgaaaaaaaaggaaaaattccggtattccacggccggacagatctggcgtctgatttatccgtttttgattcattatggagccacactgcttgcaacgatcgctttatatctggtatatctgatacaggcgggcggactgcaggagactgccagtgccggacagcgtctgatcaacagtacgttatatgttactctgatcggtgatcttacagcagcgatgatcctgtatctgttttaccggaaagatcagatgcatcggaaagaaggattcagtggaacaggaaaagcttttgtgtgggcacctccggtgatctggttcagtgtgatcatcctggcaattgccacaggacagtttttaaatgatctgatcaatggattgcatctgaacgatctgtttactggctacagtgaggtgtctgaacaggcattttccggacagccggtgggccttatgattctggtagtgggaattatcggacccatctgtgaagaactgatgtttcgcggaatcgtattccacagactgaaagactgggtcaaaccacaggcagcaattgtaatatctgcgttattattcggtatctatcatggcaatgttgtacagtttttttatgcaacatgtatgggtgtgatgcttgcgatcatctatgataaaaccggaactttgtggatcagcatcgttgcacatatagcagcaaatctgtggagccttttcggaagcagtttctggagcagtctgtggcagcagattccggcaggaatgctttgcagtattatgatagaaattttgttatgtgtgattccgacatactggttatttggatataaaagaaaataaaaaaaagacttgtaaccgaaaaaagcttatgctataatcacaacgatgcataaaacacccgtgccgattccgagaaggtgcctgaaaacaggtctcgaaaagaatgagaagtacggggaagattaaaaccaaaaaaggagattgaaatcatgagcgttatttcaatgaaacagttactggaagccggtgtacattttggacaccagacaagaagatggaaccctaaaatggcagagtacatctacacagaaagaaacggaatctacattatcgacctgcagaaatccgttggaatggtagatgatgcttataaagctgtatctgacatcgctgcagaaggcggcacaatcctgttcgttggtacaaagaaacaggctcaggatgctatcaaagttgaagcagagcgttgtggaatgtactatgtaaacgaaagatggttaggtggtatgctgactaacttcaaaactattcagagcagaatcgctagactgaaagagattgaagctatgcaggaagacggaacatttgatgttctgccgaagaaagaagttatcgcactgaaaaaagagctggataaactgcagaaaaacctgggcggaatcaaagacatgaagagaatcccggatgcaatctttatcgtagatccgaaaaaagagagaatctgtgttcaggaagctcatactcttggaatcccgctgatcggtatctgtgataccaactgtgatccggaagaactggattatgttatcccgggtaacgatgatgctatccgtgccgtaaaactgattgtttccaaaatggcagatgctgttatcgaagcaaatcagggtgcaacaggcgaggaagaattcgttgaagaggctgttgaggaggcagtagaagagtaagattttgtatccattcagctgtcggagaggtattctccggcagctgagtaactgtaaaaactcaattttaggaggaaatcataatggctattacagcagcaatggtaaaagaattaagagaaatcagcggcgctggtatgatggactgtaagaaagctcttacagctactgaaggtgatatggacaaggctatggaattcctgagagaaaaaggtcttgcaactgcacagaaaaaagcaagcagaatcgcagcagaaggtatcgtaatgctgaaagttgcagaagattccaaaaaagctgtcgctgtagaagtaaatgctgaaactgacttcgttgctaaaaatgaaaaattccaggcatacgttgcacaggttgctgagcaggctctggaaacagaagcagcagatatcgatgcattcctggctgagacatggaaattcgatacaaccaaaactgtaaacgaagctctggctggacaggttgcagtaatcggcgagaacatgaagattcgtcgtttccagaaagtagaagaagaaaacggttttgtagcttcttatacacatatgggtggaaaaattggtgttctggttgatgttgtaacagacgttgtaaacgatgaaatcaaagagatggctaagaacgtagctatgcagatagctgctctgaacccgaaatatacaaacagatctgaagtaagcgaagagtacatcgctcacgaaaaagaaatcctgatggctcagatccagaacgacccgaaagagtcccagaaaccggagaaagttattcagggtatgatcagcggacgtatcaataaagaactgaaagaaatctgtctgctggatcaggtttatgttaaagcagaagacggaaaacagtcagtagaaaaatatgttgcagaagttgcaaaagcaaatggtgcaaacgttaccatcaaaggctttgttcgttacgagaccggtgaaggtatcgaaaagaaagaagaagattttgcagcagaagttgcaaaacagatgggaatgtaatttccactgcgaacttgcttcttaaaatccctgaaattataggaaaatcaagggtttctgctctttcaagagtaaaaatccagatatcgtaaagtttcgtaaaatatcgcaatttatcaacggttttttggtacagaattggtagggattttggtaaagaattttaccaaaatctgaaacgaaaagtttgcgaagtttttaataagtctaagggatgtagtatttccacaatatgtcaaaacgacaaaacaacagacctgtatacttgtagagatataagtaagcaggtctgtttttatatgcaaaacggattagtatctttccgatacacatttttagtaatctgaatacatatgaaagagtggttaaatttaagagatttctgttgtgaaattatgttcgatttgataagataaaagaaggatgaaaaatttgaatcagttaaacattgtaactctacaggcagcagaggaatctgcctaagatcctgttacacctgctgtatcatcgggtttggcatctgtatcctttcggtttcgctgcgggcttacccgctcttttccttgcgtgggaagccatggtgtgctaaactgttcagggaaataaacacaaaggtggaacgatacgtaatgaaatgtacgatcataggaataaccggaggaaccggttcggggaaatcaacgtttactaatcgcttaaaaaatgaatttccggacgatgtggcagttatttatcatgacaattattaccggtgtcaggatgctattccctttgaagcgagaaaaaaagtgaattatgatcatccggattcactggagacggatcttctgacagaacacctcaaaaagctaaaagcaggagaaagcatcgaatgtcctgtgtatgactatagtcagcataatcgctcaaaagaaacgcttcatatagaaccaaagaaaattattctcgtggaaggtatccttcttctgacggatccacgggtacgggaactgctggacatcaaaatttatgtggatgcagatgcggatgagcggatcctccggcgcatcatcagagatgtaaaggaacggggaagagatctggataatattgtagagcagtatctgaccacagtaaagccgatgcattatctttatgtggaaccgatgagaaatcgggcagatattgttgtcaacagtggaatgaacgatgtggctttcgatgtggtaagatctaaaatccgggatctgctgtcagaatgaaagtaaatttggagaaaggatataatggatttatgagataccatgatataacgaaagatgatatgttaaacggtgacggactgagggtggttctgtgggttgctggatgcagccatcactgcaaaggctgtcagaatccgattacctgggatccggaaggcggagtactgtttgacgaatctgcaaaacaggagatttttgagcagttggacaaaccgtatatagagggaatcactttcagcggcggtgatccgcttcatgagaagaatgtggatgaagttacggcttttgcaagagagattaaggaaaaatatccaaagaagaacatctggctgtatacaggatatctgtgggaagatattcaggatctgccgattgtttcttatctggatgtgatagtagacggcaaattcgatctggaacgcagggatgtgagccttccatggaagggaagcccgaatcagcgggtgatcgatgtaccaaaatccagagaagtaggtctggtagtattacacgcataaggagaaaagaatgaaaagaatcgcaaaatttcataaagtaagctgggaacagttccggaaggactgggtagataccttcggggaacagccggaagaaaagatccgggaaatatatgaaggtattaaactgccaaaacgtgccaccaggggaagtgccggatatgatttttttgcaccggtcagctttacactggcgccgggagagatggtaaagattcctaccggtgtccgggtggagatggcagaagactgggtgctgtgcctgtatccgcgaagcggtcttggcttcaagtatcgcctgcagttgaataacaccgtgggaatcattgacagtgattatttttattcggataatgaagggcatatgttcatgaagctgaccaatgacagcaaagaaggaaaaacgctggaagttggacagagtgaaggaatggtacagggaatcttcatgcagtacggaatcacggaagacgacgatgcagatggagtgagaaatggtggttttggaagtaccaccggaaaataagggataggaaagatgaaagcgagaaactggctttttttagcttcttttcttcttatgttaaaaggagctatggatatcagtatttattttgtgcagtatctgagtctgggtctcagatatataccgactgcaccagcgcagatgcacagggccaatgtactgtgtattatctacggaagctatggagtatgtctgttgatagtaggtattctgggagtgatcttccgggagaatccacgaagactacgattcttgatgactacggggctcatattgttcggtttgggcttttttactggcatggtaaattatctggtgcttttatgggatggacacagcatcagagatgctgtgtccagtgtgatcacgagtgtcctgttaccggcaatgtttatccatactacctatatcggaagactggaatatgcggaagatctgaaatacgaggatatcggtgatgataaagacaaggatgtgtaattcttttacacatccttgtctttttttgtgtgtaccggatccgaaaggggaagcgtatgtaaaatcactttacaaagtcccggtttatttaacgcttattttacgaaagacaactttcggttttaacatagattttctatactctctttgtcagataaataaagaaaaagaatggttatgactaggaggaaattttattatgaaaaaaacatgggcagtaatgggaacagcagttgcagtatccgcaatgatctttacaggatgtggaagcaacaatactacaaccggtacagatacaacacaggagtctgaaaacacagatacagcagcaacagacactccggcagctgaagacagtaagggaggagatttctcgggactgatcagtccgatatccagagaggaaggatccggaacaagaggagcttttatcgaactgttcggtatcgagacaaaagataccgatggaaataaaattgataacaccacagatacagcagaaatcaccaacagtacttcagttatgatgacaacagttgcaggtaatgaatatgcaatcggttatgtatctctgggatctctggatgacagcgtaaaagcattgaaaatcgacggtgcagaagcttctgtagatactgtaaaagatggttcttacaaaatttcccgtccgtttaatattgtaacaaaagatggtttgagtgaggtggcagctgattttgtaaaatatatcatgagcgaagacggacagaaagtagttgaagataacggatatatcagccagggcaatgaaggtgcatatgaagcatcaggtctttccggtaaagtaactgttgcaggatcttcttctgtcacacctgttatggaaaaactggctgagagctataaaaaactgaatgcagatgtggaaatcgaagtacagcagaacgattctaccacaggtgttacttctgccatcgacggaatctgcgatatcggaatggcatccagagaactgaaggatacagagacttctcagggtgtaaccgcaacaccgatcgctttggatggaatcgcagttatcgtgaacaaacagaacccggtagatgagctgaccagtgatcaggtaatgtctatcttcacaggagaaacgcaggactgggcagacgtacagtaaatgatcagaaacagaaaagaaactgttccgtattccatagaaaagtgaaagacggaacagtttttctctgaaagaaggagtaacatgaaggaagcaagagaattcattatgaaatgtgttttcatcctgacagcatgtgtgtcaatcgcggcagttgtattgatctgcatctttatgtttgcaaacggaattccggcaatcgcaaagattggaccattgaattttctgttgggagaaaaatggaaacccatgaacaatattttcggtatcctgccgatgatcgtgggtagtatctatgtaaccgcaggagcaattattatcggtgttccgattgcttttttcgcatcggtatatctggcaaagttctgtaacgagaaattatataaaattctcaaaccggcagtggaactgatggcaggaatcccatcgatcgtctacggattctttggtctggtagtaattgttccgatcatgcagaaactcatgggaggaagcggaaaaagtgttctgacagcatcgatactgctgggaattatgattctgcccaccgtgatcggtgtggcagaaagcagtatccgtgcggttccggactcctattatgaaggagccctggctcttggcgccacacgggaacgaagtgtgttctttgcagtacttccgggagcaaagtcaggaattcttgccggtgtggttcttggtatcggtcgtgccatcggcgagacgatggcggtgatcatggtagccggaaatcagccggtgataccgggaaacctggctatgggcgttcgaacccttacttccaacatcgttatggagatgggatatgcaacggatcttcacagagaagcactgattgcaacggcagtagtgttatttgtactgatcctgatcattaatctgtgctgcagtgcactgcaaaggaggagcggacagtgatggaaaagataaaaggtcagctggaaagttacaaagaacagccattttctctggtgctgcggtttttgatgtggattgccacatttcttaccgtggggatcacagtctgtatcgtaggttatatcctcattcgtggaataccgaacctttcaccggagatgtttgcctgggaatataatacagagaatgtatccatgatgccagcaatcatcaacaccgttctgatggtacttctggtattactgatcgcagttccggtgggtatcggcgcagctatttatctggtggaatacgcaaaaagaggaagcaaactggtaaaactcgtaaggatcacagcggaaacgctttccggaattccatcgatcgtctatggtctgttcggttatctgttatttgcaacaacattcagatggggttataccttcctgggaggtgcgctcactctggcgattatgatactgcctttgattcttcgaactacagaagaagcactgaaagcagtaccggattcctttcgtgagggaagttttggtctgggagcgggaagtctgcggacaatcttccgcatcattcttccttctgcggtaccgggtatcgtatcaggtgtgattctgggtatcggccgtgtggtaggagagacggcagcactgatgtatacagcaggtactatcgcaaaagtacctggactgatgagttcgggaagaacgctggctgttcatatgtacgcattgttgtccgagggactgtatatgaaacaggcatatgattacttcctattaggaacgctgtaaatacaaggcttttcggagcctgcaaaccagaaaaaataatatttgatctatcacattacgcaaaaagccgtccggcatgagaaacgggcggcttttttgcgtggatagacggaaaggaggcacaaaaataactacaaaattttagcgctctaatttgtgcaactttaacgaaaaggaggatcgtaaatggccgatgaaaaactgaatactggccctgcggagaatatttccccggaggccgccgagcctatcgccacacccgaacaggccgcagcatctgaaccccagcaggaacagaccgggcctgccatacctgagcccggcgatgtggttgtgtcctttgacaaaatcaatgagcttatggcagaaaagagacagaacgcccgcgccgaagtcgaaaaggcggaaacccccgaagcgccggaggcggcagcctccggagaaataccgcagcccgccaatatggaggaaccgaaaaagccgcgccgtggccgtccgccgaaagcagaaaaggccgcgactgaaaatcaaaaatcggagaaatcggctggggcccgcaagggccgtccacccaaggcggataaggcggcccctgacaagcccaagccgtccaaacgagacaaagtgtcccgaagtgacggaaaggccccggatgccaaggagcccattaagcccgcacaggatacggcaccgaaggaaactgctactgcggaacagacggctcccgagccgaccacaccgccccgcccggttgaggaaggcaagctggtttatctgaaactatccgaggttcatccgtttcacacattccgtccgcacccctttaaggtacgggacgatgcgaagatgcaggaaatcgttgcttctatccgagtaaacggtgtaatggttcccggtcttgcccgcccggagaaagacggaaacggctatgaaattgtagcgggccatcgccgtacccacggcagtgaactggcggggctggaggaaatgccctttattgtccgtgaaatgaccgaccacgaagcggtgcaggccatgaaggacagcaacaagcagcgtgacgggatgctccccagtgaattggccgcgctgctggaacttgaggttgaggacattaagcatcagggcgggcggctaaaaggcgttgcggaaggcgatgttggaaaacgctcggttgagattgtgggcgaggcgcatgagatgaactataaaaaggtcatgcgctacttgcggctcaactctcttgtgccggagcttctggataaggtagacgataaaaagatgggctttatgcctgccgtggaactgtcctacatcaaaccgaaaaatcagaggcttattgctgtttccattgacggggagcaggcttcgccctcgctggcccaagctaaacggctccgggagctggataaggaaggcaagctcaacggcgatgtcattgacggcatcttatcagaacagaaaaaggaggatcgaggcgtgattatttctactgcggagctggaaaagtattttggcaaggaggtcactcccgccaaaatgaaagaacagattatgtccctgctggatgactggaaagaaaaacagccgccggagctggcaaaagccccgaaaaagcaggaacttgacaagtaacaacttcgagacactttgtcccgagggccccgccctcgcgcagaggctctggtggtatatatcccccgtcgctgcctgttttttagtacagccgggagtgggccgtcaagggtgcagcgcaccgccgttttcggcggctcgcccttgacggtctgccccggctgtgctatttccccggcaagcggcgggggtatatcctccagagccgccccctttcccaagactgggaaagggcgtggggtttgggttgaactttcttattaaaatatcggaggtatgaacgatgaaacgatcccttgcttatatcaccgctgcatggctcggcggcgatagtgaaaacgcagaactggcggcgcagtattgtcgcaccgtatatgaggcaggcttttctcctatttgcccgcccctgtacttgcccctgtttctcaacgatgctgttcccgaggagcataaaagcggcatcgacatgagccgtgacttgctccgccgttctcatgtgctggttgtctgcgggcacagtatgaccgaagtcatgaaaaatgatattgccgtggcccagcggctgggaattacggcaacaacccttgagggtatcctgaccgtcaaggggcagggccgtcgctgatggcgaccctgtttgaagcctacgttaccaacgccggaaagtacagcgagggccagcttgtgggtgaaacactgaaatttcccacaaccgcccaggaggtggaggctctcttgaaacggatcggcgtggatggcgtccgctatcaggaaatttttattacctctttcgatggggatgtgctggggctctatgaccatttgagcgagtatgaaaatctggacgagcttaatcatctggcctgcctgctttccgagcttacctcatcggagctggaaacactggaggccgtcctcgacagcggcgatcactgttcttcggtgcgggacatcatcaatctgacacaaaatctggactgttacggcttttaccccggcgtatccgatgaggaaacgctggggcgtatttatgtggacgatctggaaatgttggatgtgccggatcaggtaaaaccgtatttcgattatgaggcgtatggccgggatgcctgcatccacgaaaacggccattttgccccgggcggctatgttgtcaaagaaagcgatcatttcgtggaagtgtatcacggcttgcaggatattcccaaggagcataaggtgttctctttcccgaagctctcgatccgggagcagatggcggcttatcaggaaatcatagacggttcttctttggagggctaccgtcaaatgcagaaaaaagaccgtggggatcggtgatggcacttcgagacaaattgtcccaaggaaggaggcggtgtaactgattgatgaagatatttcccggcgcacgatagccatatctgtaaaaacaaccaagctgacggcgcggggactggcgtatgtgctgggcatggtgggccggaagatccgcaaggcataccgtggacggcaagtgccgcacggcaaacaaagtgtgcgaaagctcatggcccacggcacagccaccaacagcattgagctttccggggatgccaagtcctttgaccgcgtggcccggaaatggaatgtagactatgcgttctataaaaccgggccggacaaatacctgctgtttttcaaggctggacaggcagacgcaatgaccgcctgcttttccgagtattcccggaaagtgttaagcaaagcaaaatcgaaccgtgttcccatccgggaacaactgaaacaagcggcagatcagctttccaaagaaaagccgaagcagaaagaacgtgcaaaggaggtgacccatgaggacagataagatcagaaaatatctcattccgaacattccctatctgttcatcctgtgggcgttcctcaagctgggaacggcctaccggctggcggagggtaacgattttgcacataagctcatcgggctgggccagacgattggcccggcctttgttgactttgcacccggtttagtcccgctggattggcttgtcggcattgtaggagccgttggtttccggctgctgatctatttcaaaagcaagaacgctaagaagtttcggcgggatgcagaatacggcagcgctcgatggggaacggaaaaagacatcaaaccgtttgttgatccaaggtttgaaaacaacgtgattttgaccgggacagagtttctcacgatgaacacccgcccgaaaatccccgcaaatgccagaaacctgaattgctgcatcatcggctcgtccggctccggcaaaacccgcttttggctcacgccccagcttttacaggctcattcctcttatgtggtggtcgatccgaaaggcggtgtgctggggcaggtcgggactttcctgcaaaaacgcgggtacaaaatcaaggtgttcaacagcattgatttttcaaaatccatgcactataacccgttggcgtatatccgcaacgaggccgatattctgaaattcgtggatgccctgatttccaacaccaagggcgaaggcaaggaaggtgatccattctggacgaaatcggaaacgcttttgtactgtgctctgattgcctacatcattttcgaggggcctgccgaggatcggaacatgaatacccttgtggatatgatttccggcatggaggtcaaggaggatgacgaggactttatgaacgcggtggattatatgtttgccgggctcgaaaagcgcaagccggattgtttcgcagtcaaacagtataaaaagtacaaattggccagcggcaagacggcaaaaagcattttaatttcctgcggtgcgcggctggctccctttgacatcccgcagcttcgtgaagtcatggcctatgacgaattggagcttgaccgcatcggagatcggaaaacggcggtattcttcgtcatttccgataccacgcagacttacaactttttagtggcgctggcattttcgcagatgttcaacctcctgtgtgaacgggcggacaatgttcacggtggccgcctgccgcaccatgtacgggtgctgtgggacgaagcagccaacacgggacaggtgccccagctcgaaaagctggtcgcggttatccgctcccgcgaggtgagtctgtgcctgttgtatcagcagttggcacagtgcaaggccatttacgataaacacgccgagacaatcctcggcaacatggacagcgtggtgttccttggtggccgcgaagccagcaccatcaaggaaatatccgagaactggttgggaaaagccacaatcagtatgcagaccgacagccgctcccgtggccagtcggaaagctacagtcaaaatacccagcggctgggccgggaactaatgaccccagccgaacttgcaaccatgccgggagacaaatgtattttgcagcttcggggcctgcccccgttcttctctcccaagtatgatctgaaacagcatccgaactaccgttatacggcggaggccgataaacagaaaaacgcttttgacctcgacaggctcattaaccgccgcaggcggcccgggctgaacgaggcgtgtacgatgtatgaggtggctgtgccggacgatgcactcacggaagaggacgaggacatcctcaactatgatgacatcgacgatccagacgcctttgcataaacgcttcgagacaaagtgtcccgaagtttgtaacctgccgcctgtatgggcggcttttttgttaccgggaaaattccggagaaatggaggcttatatggcatttttctcatctgcaatcgacactttacagaccctcgttattgctctcggcgctggccttggcgtgtggggcgtggttaatctgctggagggctacggctcggataacccgggctccaagtcccagggcatgaagcagttcatggctaattaaagggaacaaaaagaaaggaaaagccaatccagacggtatcagcggcaggctacaagaataaattgtgatttcacaagattggtgctataataagagaaaagttcctgccggggcagccgctccggtggtatggatagaaaggcaggaaaacaatatgcacatcagctataaaccactctggcacacactgttagagcgtgatatgagaaaagaggatttaaggcttgccgctggtatgacaacaaatatgattgccaacatgagcaaagagggaaagcacatcagcatggatacattagcccgtatctgcgaaacgctgaattgtgagattaccgatgtgattgagttagtaccagacgagcctgcttccacaggaggtaaggaacatgagcgaattgaaaccaagaataaaagaaaacggaattgattatatccttgttggagattactacatcccggacttgaagttgccggaggaacaccgccccatcggaaagtacggacggatgcaccgggaatatttaagagaagtctgcccagccagattacacacattgaccctgaccggggaattgtggacatatcttgcagacctgaacgaacaggcacagaaacggttagacaccatcatggagcagatgaaagctgccgagggcgtgaccgaggaattgaagcgtacccgtcaaatggaatgggtgcagcgttgcaataacattcacaaccgggcagaagaaattgttttacatgagatgatttattcataacggtatggtagaatgattattacaaattagaagttgtaaaggagactttgtatgggtagaaaagaaataacaacaaaagaagatttaatgaaagtaatagaattattcgaaaatactggaattacatactggttggatggcggatggggtgtagatattttagctggtaaacaaacaagaattcatagagatatagatataaattttgatgctcaacatacggaaaaattgttaaatgtgcttttgaatctgggctataaaattgatacagactggaaaccggttagaatagagttatatagtgatgaacttggttacttagacattcacccgttcgttttaaatgaggacggaacttcaaaacaagctgatttagagggtggctggtatgagtttgaaaaagattactttggtagtgctttttttgaaggaaaaacaattccttgtatatccttaaaaggccaaagagttttccattcaggttatgaattaagagataaagataagcatgatatttcaattcttgaaagtttatcaaaataacattgctgtaatttctaagataaattccactttatcgctttgaaattttaactgaataagtatagcaccaaccgctgctacatggaggcaaacacaaccatgcaacagcggtttttctttaccgttttttcctttgactgataggagttcctgttttctttgatttttgtagaatccgaatgagccagcgaaattcttcgtctgacagatttttatagttgatgccgagctgcttgcagtaaaggacaaccagcttttcatcccgactgcccttgaaattttcaaccgcttccaaattttctttcaattcatcggcaacggtggtctggggcgcactctcgctgtcctttttgtgggcttcccgaatatcccggataatgagattgaggtcatcaagaaccatgtggctgaaatattcatcatcgctgatatgggcggcttgcagcactttcaaatgcgggtcgtcttcgccggggcgataccgttcaatgatttcatgccggacagtatcgacaagggcgttgaggttttgaatctgcatggtggcaatcccatctacataaatctcaatgtccgcaagaaacttgataaagtccttatgagtggcaagctcacagagcagacgattgttaatccgaccgcctttcagaagtgccaccatctcatcattcaaatgcagctctgttagtggcgtgttgatctgctcccggttctctgtccggcacagcagataatcaacggaaaccccatagaagtctgccagcgtgataaggttgccatgattgatttccttataatcctctttttcataactgccaagagctgatttggaaatgcccgtcagctctgataattcttccagatttaagcctttgtccttgcggagttcccaaaggcgttcctgtatgcttgtcgctcctttcatgggcgcacgctcctttccggcggtttcattactgccgcttaactggattatatcatactttccgcaatcgtggaaatttctgatttttacccttaattcctactttgtggacatacggcacagggcacaaaaatgttctatgatacaggtagttcatcgatggattattccaatcgaatgaccagcctgtgtgggatatgcttccccggcgatgtagcgccatgacttttggcagggatatggaggaaccctgaccgaaacgagcgtaccaaagggagcgatacgccgctgtgagattcaggggaggaacgacaccggggagaactggcgaactgataccgaaatgataccgaaacacgacaatctgatagggggatagtctaccctattgctgatacttctggagattttagacggctctatgaccgtaattttgccgaaaatcgccccgaaactatacactaaaacgggaggaaacgcaatatgccgagaatgagcaaaaagaggaagcatgagctttctttttacctcaatgaccgggggcgtgtcacttacaacgaattatgccggaaatgcaagcatgggtgcaagcagagcttccgggcggttgtggttgactgcccccgttatttatccaaaagagcaaagaaaaaggaggaacacaccgaatgaattttgaatttatgacgataggcacaccgttgccgccctgtatgccctttcccagagcgttgacaggatttccagtcagcagcaccgcaaaggtcatgtactgccggatgttggacgctatgctatccaacggacaggaggacgagaacggaatcctgtttatctgcttccctgtcacagccattgccgcagtcctgtcccgcagccccatgacggtcaagcgttctctgaatgaactggaaaccgccggactgatcatgcgagtgcgtcagggcgttggagaaccaaacaggatttatgtgctgataccgggaaaggaggacgctgcccttgcctgatacctcaaagctggaaaagctcaaccgagagttggaaaagagtgaaaagaaactgcggaaagccatcaatgatgaaaaggcattgcagcaccagctaaagcagcttacccgaaaagaacggacacaccggctctgtactcgtggcggtatgctggaaagttttctgcaagagccggaacgcctgacagatgatgatgtcatgctgttgttgacactcatttttcacaggcaggacacgcaggaactattgaagaaactgctggaacgtgagaagccggaaaccccttagtttactaagggcgcaattatacaccacccagaggttggtgcattgcgttctccgaaggctccttgccggagggctgtgatttttcgcagtcatggtctgctccaaatcatacaggggacgctacgcttcccctgcgctggctaccgccagctacccttttgtggacttgtcatctggggacaccttgcgttgcaagctgttcccagccgacaagtttcataaaatatgctatcttttcgataggcaataaagtataataaagtcagcaataaatcggaattttacggtcagtaaggaatgcgtaaagttatatgattgtattataagcgatttgttaaatttttataaccacttgtatttgcctgcgatttatggtataatattttgaaatttagaaagaggtgggaagatgattaacttttcttgcaaataaaatcaaaatatgcggtagtgctatactttggcattattgtgtctattgcaagaaagttatatgtctatcttactcaatatagtgctgttgccacttttgcttagtggtgttattttatgctatgacgagctgcaaggataaactttcttgtggctcttattttgttttggaggtgctttatgaatagtgcagaacagatagttacacatgattcactccgtatagtgtcggttccttttggtgaaatctatacgtagtaaacattcaccgaaccgactttgtatcgtatgacatgcaaaggaggataatatttatgtcaatgattaaaattgaaaaccttacgttttcatatccgacaagttatgataatgtttttgaaaatgtcagtttccaggttgataccgattggaagcttggttttgtgggcagaaacggacgaggtaaaacaacctttctgaatcttctgcttgggaaatatgagtatagtggaaaaatcctatcatccgtacagtttgattattttccttatcccgtttcagataagaatcgtattacagaggatatattgcaggagatttgcccacttgcggaagaatgggaacttatgcgagaactttcttatcttgatgttgatgtcgatgtgctttggcgaccttttgaaacactttccaacggagagcagacaaaggttttgattgccgctctttttcttaatgaagggcatttcctactgattgatgaacctaccaaccatttggatgccaaagcgagaaaaagtgtggcggcatatctgaaaaagaaaaagggattcatcttagtttctcacgatcgtcgctttcttgacgattgtgttgactatattctatcgattaaccgagcgaatatcgaagtgcaaagaggaaacttttcatcatggatgtcaaattttgagcgacagcaagaatttgaactggctcagaacgaacgtttgcaaaaggacatcagacgattacagcagtcggcaaaacgcgctgcagtatggtctgaacgtgtagaagcttccaaaattggggcagcagataaaggttatgtcggtcataaagccgccaaaatgatgaagcgttcaaaatctatagaagcgagacaacaacagacaatcgaacaaaaatcagcattgctgaaaaatatggaaaccgcagaagccctcaagatacaaccgcttaattaccatacagatttgcttgcatcattatcgaatgtagtagtttattatgatggcatttcagtttgtgaacccgtttcgtttgaaataagacagggagaacgcattgtgcttgatggaaagaacggcagtggcaaaagtagcctgttaaagttggtagtcgggcagtccatagattatacgggtacagtaacacttggctctgggcttgtaatttcttatgtgccacaggatacatcgtatttatgtggaaccctttccgagtttgcagaagaaaacaaccttgatgaaagtttgttcaaggcaattcttaggaaaatggactttgagcgtgtacagtttgaaaaggatattaaagacttttctggcgggcaaaagaagaaagtcctaattgcgaaaagcctttgtgaaaaggcacacttgtatgtatgggatgaaccgctcaactttattgatgtgtactcacgtatgcagattgaacaactcataacggagtttgccccgaccatgctcctggtagaacatgacagtgtttttcgagatactgtggcaagtaaaattgtgaatatctaaattggttcttccgcaattttacgtttttcgctttaataaaaatggagaatgctgatttacactggcattccagtattgaaaaattacaaaatacggataattgcgtaagaacctctaaattaaaataattgtatgggttaattccagctttacagagactcaaattccagtttgtagaattaagaaaatcgtaatttgtggaggtaaaatatagatgaatcaaggtagaattattgtaatcacaggtgcgccggggacaggaaaaactacaacggcatctgctgttgcaaaagaatcagatttggaaaagtctgtgcatatgcacacagatgacttttatcattatttgagtaaaggggcaataccaccgcatttgccagaatcaaatgagcaaaatttgattgtcattgaagcgtttttagaagctgcgaagcgatatgctcgtggtggatatgatgtaattgttgacggtattatcggaccgtggtttttaaagccgtggcaaagtcttgttcgggaacattatgaggtgcattatattattttaagggcaagtaaggaagaaaccttgaagcgagctgttgaacgctcaaagttagaccgaaagacaaatatcgaattggtagaaaccatgtgggagcaattttgcaatctgggaatatatgaatcgaatgttatagatacgaccacttattccattcaagaaactgtttccgcagtacaagaaaaaatcgcaagtagggcagcgttgttgtcttagattgttttggtgcaattccagtttgttagctttacatcgggtcaacttgtcccgaacttttacaactaaatacccgccgctcacacagtggcacaccgagcaggaaatctgaaaaaggtctcctgctttttttctgcccaaaatgaggtggtaaaacgccaccccatccaccaattagcgaaaggagggacacgaaatgccttgtccacacaacgaaatcacgattgttcagcgcagccagcggcagtctgcggttgccgccgctgcttaccaaagcggcgaaaagctgttctgtgaatacgaccagcaagtaaagcactacccggaaaagcgtggtatcgtccacaatgaaatcctgctcccggcaaatgctccacaggaatatgcagaccgcaatactttatgaggatatgattgcagggcgtatcagtgagcagaatttcaacaccatgctggaaaagacacagaccgagcagacggagcttaaaacaaaagtgtccgagggcagaaagcggctgtccgatgaagtccagcttgccaatgatgcaaaacaatgggtggaagccattcaggaatacgccaacatcacagagctggacgcagccaccctcaaccgcttaatcaaagaaatcgttgtgcatgagcgcattgacgaagataaaacaagacacatttctatcgaaattcattttaatctcaaacccatcccggaggtggaacaggtcactgcctgacctgtcccgccgggacggttctcttaacaacaccatatagattttttgtacgccgccgcccgccatcgagcagagtttttacacctaattggggatgaaacagctcatggcgggcggcggcatcatcgtcattggcaccacactgatccctctgttgtctggcctgttttaaggtaagcgcttatggattttctcaccgactggctcacaaactggctcaaagagcttctgattggcgggattatgggaaacctcgaagggctttttgataccgtcaatacccaagtcggagagattgcggcacaggtagggactaccccggcggcgtggcacgccggggttttctccctgatccgacagctttccgaaacggtgatcctgccgattgccggaatggtgctgacctttgttgccacttatgagctcatacagatgcttttggaaaagaacaatatgcacgaggttgacgttgcgaacctttataaatggatgttcaaaacggcctgtgcaatcctgatcctgtcaaatacattcaatatcgtcatggccgtgttcgatgtgtcgcagagcgttatcgcgcaggcaggcgggctgattcaaggctctaccgatgtttcggcggatatgcttgccgaactggaaacctcgctggaggcgatggacttggggccacttttggggctgtggctgcagtctgcgctcattggcttcacgatgaaggcgatgggaattatcattttcgttttggtgtatggcaggatgttggaaatctatctgctgaccagtctggctcccatccccgttgctacgctttccaaccgggagcttggcggcaccgggcagaactacatcaagtccctgtttgccgtaggctttcaagggctgctgatcctcgtatgtgttgcaatttacgcggtgctcattcaaggcatcgcaacaagcggcgatcccatcggggcaatttggggaactgtgggctacacggttctgctttgcttcatgctctttaagaccgggagcattgcccagcgtatctttggcgctcattaacaggaggtggtgcttatgccgcgaagatacggggcagacggaacgcgcttatggaatggaaaaacgccggaggagtttactgaggcggatgcttaccgctttatggcggaaacagaggccgtcctgcaaagaaaagagttgatggacgaccccgcccagcctgctccggcaagcggaaaggaggaattttatctgagtaagaaagacgatgtattgctgaccccggagcagattgctgcggaggaacggcgctggctgtttgatgctcccatcgcggagctggcagaagtcaagggcgttagcattgatgaggcagtaaaaatgcggacagatgctgtcttgcaggaggcggttgttccgatcacggtatctgtccgcccgattgagccgcagggaaaactgatcggcttcgccagcgtcaattttggcggtgtggtcatcgacgattttaaggttgtggacgggaaaaacggaatttttctcggagctccctctaaacccgatcctgccagccggacgggataccgggctacggttcggattcctgaccgcgccacacaggaacggattaacgcggctggtgtggaggcgtatcatgcggcggtggaacagcttgttgcacgggcccaggcggtacggcctgccccgatcaaggagcagatggccgaggccgcgaaacaagctggaaaagaaaacgccgcccggcctgcgcctgccaaggcaaaggaggcccgcaatgaccgatagccacactttgggacaaagtgtcccgaaggagggcttgtttctcttggacggcatcgagggcctgcgttctttgccaaaacatagcgtggatatgctgctgaccgatccgccctacggcacaacccggaattattgggatgtgcccctgccgctcccggaactgtgggaggcggtgaaatgggcggtcaagccgaatggcgcggtgctgttcttcgcacagtgcccctttgacaaggtgctgggcgcatccaacctcgccatgctccgctatgagtggatttggtacaaggagcgaggaacaggctttctcaatgcaaaccgggctccactgaaaaagtccgagaatatcttggtgttttaccagaagtccccggtctacaatccgcagtttacttatggcaagccttatgcccgcgttcattcccgaagcggtacaagctccaactatgggaaatttgaacggcagggatcggagtccaacgatggccgccgttatcccggaaatgtactttttgtgcctacggtgtccggcggcatccaccccacgcagaagcccgtggagctctgcgagtatctgatccgcacctatacccgtcccggagaacttgtcgcggacatttgcgcgggctccggcacaaccgcgattgcagccatcaacacagaacgccgctttgtatgctttgaaacggccccgtccttttatgccgccgccagtgagcgcatccgtgcggcgcaggcagtaaaaagctccggcgagaaaggagtgtaattatccagcagtattctatcatttacgccgatcccccttggcgctactcggctaagaaagtacagggcgcggcggaaaatcattatcccactatgagcattgaggatttatgtgcgttgcctgtggctaatcttgcagccccggacagcgcactctttttatgggccactttcccgcagctcccggaggcgctccggctgatcgaggcttggggcttcacctacaaaagcgttgctttcgtctggctgaaaaagaacaagaaggcggatagctggttttacggccttggcttctggacaaggggcaacgcggaaatctgcctgctggcaaccaagggacatccaaagcggcaggctgccaacattcatcaattcatcatttccccgattgaagcccatagcaaaaagccggacgaggcccgcgccaaaatcatttccctgatgggcgatctgccccgcgtggagctctttgccaggcagaccccgcccggctgggctgtatggggaaatgaagtaacatcaaccatcccggactttgggacacattgtcccgaagtacagaaaggagtgtgatctatgccctatgtaaacgtaccaaacgatttatccaaaatcaaaacaaagatggctttcaacctcaccaaacgccagcttgtctgcttcggcagcgcgggcgcagtggggattccggcctatctgctgacccgtggcaccctcggcaataccggggcgatgtttctcatgctgggaattatgctcccggcgttcctgttggccatgtatgaaaaggacggcttgccctttgaaaaagttgtgcgaaacattatccgggctaagtgtctaaggccggggatcagggcctaccgaaccgaaaacatttatgcgccctttgccgggccgggcgctggaaaggaggatgtgattgaaaaacacaaagaagaaaaacggagccgccgccaagggtaaaggccgggcggccctgtctgcccagcagacaatcccgtatctgtccatgcacccggacggtgtgtgcaagctcccgggtgggctctatacaaaaaccgtggaatatgaggacatcaattactccgtggcatccaccgaggatcagaccgccatattcagcggatggagctcattcctcaactactttgacagctcgctgccgttccagctttcctttatcaaccgccgttcctattcccgcagccgctatcaagtcaatatcccgaaagcggatgacaactataacagcgtccgggacgagtttaccgggatgctgaaaaatcagattgccaaaagcaataacggcattgaacgctcaaaatacatcacctttggcatacccgccgaggggattgcggaggctcggccccgtctggagcgtgtggaggctgatgtcatgggaaactttaagcggctgggcgttccctcggagcctatggacgggcgggcccgccttgcgctgcttcatagccagatgcatccggggagccgcgaggcgttccgcttttcgtggaaagacatcccacagaccgggcttggcacaaaagactttattgccccggacagtctcgacttccgccagtcccgcacattccgtatcggccagtattggggcgcggtgtcctacttgcagattatggcatcggagctttcggataagctgctggcggaaatcttggagctggatgcggaaatgaccgtgaccatgcacattcagaccgtggatcagctcaaggcaattaagaccatcaaggggaaaatctcggacatcggaaaaatgaaagtggaggaacagagaaaggctgtgcgctccggctatgacccggatattcttccccctgacctgattacattcagcaaggacgcagcggaacttctggctgatttgcaatcccgcaatgagcgaatgtttctgctgacctttacggtggtaaaccttgctcctaaccgccagcggctggaaaacgatgtgtttaccgtgggcggtatcgcgcagaaatacaactgcgctctgcgccgtctggactggcaacaggaacagggctttgtttcctcgttggcccttggttacaacgaggtagaaatccagcgcggtatgaccaccagctccacagccatctttattccttttatgacaagggagctccgcatggcggggcaggccctctactatggcatgaacgcactttcccacaatgtcatcatggctgaccgcaaaaagctgaaatcggcaaacgggatgtatttgggttctacgggttccggcaagagctttgccgcaaagcgcgagcttttgaatgtgtttctcaccatcccgcaggatcggatcattgtggttgacccgatgggcgaatatgcgccgctggtgcgaaggctgggcggccaggtgatcgagattgccccggacagcccgcaccacctcaatccgatggatgtggagctcaatatggccgccggagaaagcccgctttccatgaaggcggattttcttttgtccctgtgcgagctggtggtcggcggcaaggaaggcttgcagcccattgaaaagacggtcattgaccgctgtgtgcgtttggtgtatcgggagcaggcgctcggactggaaaccgcaaaaacaccgctgttgcaggatttgtacgaagagctcttacgccagccggagcccgaagcccggcgcgtggcaactgccttagagctttattgcacaggctccctcaatctctttaaccatcctaccaacgtcaagacggacagccgcgtggtgtgcatcgttctgaaaaacatgggcgaaaaccttagaaagattgcaatgcacatcacaaatgagtttgtttcgcaggcggtggatcagaacttccacgagggcgcggcgacttggtgctattttgacgagtttcatattctgctccgcgatccgctgacagccagctactttgtggcggtctggaaaatgctgcgtaaaaaaggatgtgtgccatctgctttgacgcagaacgtcaaagaccttttggccagccgtgaaatcgagaacattctggacaacacggattttatgattctgctttcgcaggcgcagagtgaccgtaccattctggcaaaacagctcggtatttccgagcatcagctttcctatatcacacacagcaattccggtgaggggctgttgttctatggaaatgtaaccattccgtttgtggatcggttccctcgcggagaaatctatgacctgctgactacccgcccggaggatatgaagaatgaaacgaaaaacgaataagaccaaggaggaggcttggtcgcagaccgcccacgcccctgacggggaacagcccgggccggaggcttccgacacttcgggacaaagtgtcccgaagtccaagttccgcaaaaagagccagcaagaacaggctgcggcggcaaagctccgcatggagtcccaaggcgaaaaactggaacaggcccgggagaagctggaaaagcaaaagccgccgaaaaagcccggcccggtaaaacgcatcggttatgaaacggcgatgcgctggacaaagggaaagtatcagttcttcgtctgtacgcataccgacaaggcccatattcacaatcacatttatttcaatgcgacggcctttgaccgctcccggaaatttcataatttcattggttcgtcctttgccctgcggcggctctctgaccgcgtgtgcatcgaacatgaattgtctgttatccaaaatccgtgccagcacagcaagggccgttttctccactatggacagtggatcggagaaaagccaccctctgccaagcagcgggtacggctggctattctcgcggctttggagaaaaagccaacagactttgccgactttcttcgtctcatggaggagtccggcttttcggtgaaacagggacgcggcggtgtcatctcattccttgcgcccgggcaggaaaaaccgactcggctccgggcttctacactgggagccggatttgacccggaggacatcaaggcagtaattgccggggaacgtccactccctgagatgccagaggagcccacggttccgccacggcgagttaatctcatcatcgacattcaaaagcgtatggcccagggcaagggcccggcttatgaacgatgggccaaggtctacaacttaaagcagatggcggctgcactccagtatttgcaggagcatcatctgacagactatgcggcgctgacggccagcaccgaggctgcggtggattactttcacaagctgtctgacgaactccgcacaacggaggaggctctttccaaaacctcggagctgatggctgccacggtggactatgccaagacccgcccggtgttcgacgggtacaaggctgcacggtacagcaaaaagtatctggcccagcatgaagcggagcttgccacttaccgggcggcaaaggataccatgaacaccagactgaacggcgcaaagctccctaaaatagaagcactaaaaaaatcccgccgtgagctggcgcgacaaaagaaagagctttatgcggaataccgcaaggcccaggcggatatgcggcaggctgtggcaatcaaggcgaacattgatcatctgctcggcgtgacggacgggcgggaaaataaggcccaggagcgatagcgacaggccgcagacaacaggcgcatagcgccgggactttgggacaatttgtcccgaagttcagcgggtttggggagctccccaacaagcatttttgcgggcctgcggccagcaaaaatttcggagtgtggccacacccgaattgcttgccatttagcggcacccccgaaaagccccctaaaaacgagaaaaacgaaggccctttttacttgacctccgtttctctggctttttgtagtccctctgctgtggcctccatgaccgtcaattccttttcgtccattgtattgagcagcctgtcaatatgctggcggcagtcgctttcgccgttctgcctgtcaggataaaagaactggtctacggaaatatccaacagggtgacgatttggtaaaaggtgttcaggcttggatgctggccccggttctcaaaatacatgatggaacgaggggtacggtctacgagctgtgcaaggtattcctgtgtccagcctttcgcctctctcttgcgcttgatctcccggcctaatgcgtggaagtcaagccgtctggtgtcttggtacattctcatatcacccctatattattttacatttcgggtttgactatgagaacgaaacacaattttatgttttagtagtattttattgcccgtcggcaaggttgccgatgttacacggacaaggtataataacagaaagaaaatttgaaaactacactttaatcacaaaaatctatgatacgctatctttggaggtgttattatgcaaaggattttagtcgttgaggacgattttgatattcaagaacttttacagaattttttgcaagaagcaggatatgaagtggctactgcaaatgatggcatcgaggcactatctttgttttcggggcaacgatatgacttgattatattggacattttgcttcccaaaattgacggttatggtgtctgtgagttgatacgaaagcaatcggatgttcccattattatgctgactgcattgagcggtgaggaagatcaaatcaggggattggatttgcaggtggatgactatattacaaagcctttttctatgccaatcttacttcgcaaaattgcagctgtacttcggcgtagcaagcggggagaagatgaaaagcctcaaatcatcacttatggcaatttacttttgaactgtgatagttatgccgccaccgtggatggatctgattttgaactgacgcaaaaagagtttgaaatattgcgggaactgctgacccatcaaggccggatattgacccgccagaacttattagataagctgtggcgatttgatttttatggggatgagcgagttgttgatacccatatcaaaaacttacgcaagaagctggggatagatttcattcaaacgatcagaggggtgggatataaagttgataaagaaaattaaaggcagtctgtttataaaagtttttatcactactgctatcctattgacaggggtgagctttctggtttacttgattttagcttggtacaccccgaaaacatattctaatacccttaatgcaacattagatgaacaaacaaaaatattcatttcagaaatatcgcaaatgcccatggaagaaacagggggtatttttgataactttcttgattatcagaatgtagaccgaatggaactgtttgaagaaaatggtaatagaataaatcttccaacggaacgaagtgctgataatgatgttgttatagaaacaaaggcttggggaaatgaagataataatgcacctattatatccaatagttatacggtttcatttcttggcaaaaatacaaactacactttagttgtttatggagcggcggggcaagtagcagaactgcaaagagcatttcaaaaagtgtttccgttacttgcatttatagtgttttgcgtatcactggttactggttggattttttcacaccttattactaaacccgtactgaaaataagccgtatttctaaagaaatgtccgaattacaatttgaatggcaattagatgaacaacggactgacgaactgggaatattggcaaagagccttaactatttatcgcagaagctcaatgtaactttgaatgacttacaggcagcaaatagaaaactggaacttgatatagaacatgaaaaggcattagaacaagctcgcacgaatttcttttcagcggtgtctcacgaattgaaaacgcctatcacgattatcaaagggcaattagagggcatgctccttggtattggaccctataaagaccatgaaagatacttgacaaggtcgctggaaattacaaacacgcttgaaacaatggtgcaagatatattgacaatttcgcggttagaaactgcgggggccgatttcaagaaagaccacttggattgtgtgcaaattatcaaagcctatttgaacgaaacagcggatttgattgcagaaaaagatttacaaatacaccttgatatactgccatctgctttcataaacggaaataagatgttggtagaaaaggttttttcaaatctaattggaaacgcaatcaagtattccccacaaagagcggatatttggatttccgtacttatgaaacatgagcagatagtattttctgttgaaaatgcaggggtgcatataccagaaaatagtattcccagattgtttgatgcgttctatcgcgtggagcagtcaagaagccgaaagactggaggaagtggacttggactgtatattgtgcaggaaatactacaccagtatggaagtgaatgtacggtttgcaatacgcaagctggggtaaagttctcttttataatttgaaagatatggaaaagcggtgggtaatcaacccgccgcttttcaactacacataaatcacaaactaatcccaaatgtatcacaaaaggtagtggtatcctttatatatattcaaagaaaggatggtgtttattttatgagcacaaaaaaactacttacattagctctcggaagtgcattgcttgtgggggtggtagctgggtgtagttcatcagtgaatattccttccgataacaacactacgaaaaatgtttcctatcaggcacaaaccgtttctgatacggaaaatgcggcgaacgattctactacagcagaactgcctggtggaagtgtggactactccatatatgaaccttacggcttgagctatgatcaggagaattattattttacctataatgggaatgtagtgagattttttaatgaccccatagctggagcgagtttcacgaatttcttttctggaacggtggatattgaggcagaccgggacgaagaaaataaccttgttggtattaaagagtgttccaaagaaaattatgaccgtcatacccaaaagcataataactttaatcccactgatacatcattgagtactgtacaaaagggagaatctactccccaactttggcttaaagactatgcagactatggcattacctacaacgagcagagcggcggttggtattataataatcagagaattaagatattattggacagtgaacaggctgttgtttacactgatgaagaaaatggagtatgtgttactatttcaagggatggcaaccatcaaatttcagaaattaaagaaatatctgaaacagatgcacaatcactcatgctaaagaataatcctattggagaagattacacctcgcaggaataatttctgctttcataatcagccgagcgatggcaaaagacggaggtgacctgtatgaaaaagattctatcactcattttaacattgttttgtgtattaagtcttgttggctgtgggcgttctatggacgacatcataaagaatgagtccagcattaccggcgttgtggaagaagtttataacaactccatacttatttccatccagacagacgcttacccttacggagcatattgcgatgtttctttggatgcagagaacaaagatgacatggttgatttcaacattggtgatgaagtcattgtctattacgatggtaacattgcagagagctatccattacagatcaatacggtgtatgcgatttctttgaaagatccagctaactgaagtaaaaataagcgttttccagttctggtacttgtagcgtaattcaagagtaaagactgccgcacgacggcaaaagaaaaaaagccgtcgtacagcagcctatcaatacgcctatttgaaacggcggctcaattttcagagccgccgtttctctttggatattcagtaaccccacggcggcccataggagggtgtcgccgtgtccatcttactttctcacaattcccatgaccttcaccagctaaaaaaagcgtagctccccctccgggacagtctgactatgaaggtacaatatatcagtacaattatgataatgtaatttcatgcgtctgcatagcgtcttgctgtgcgggcgcttttttgtacttcgagacaaattgtcccgaggtgcggggcggctccccgggatgccgctccccaccgagccccgtttcggtcactcatccacccaacaccgaaacggaggtttatttatgactacaatcaatctgaaggatttttattattggtacacacaggatcagtttattgaggtttctgacgaggtagccgaagtgtttgtgtccgatgcccggcacgaaatggcctaccagcggcggctctcccggcataaggcgcagtattctctggactgcgatgacgggatcgaatattccgcctgcctgcatgagccaacgccccaggagcttctggagcgcatggagctgttcatccgtctgtggaacgcactcaactctttgccggagatccagggccgcaggattgatgcccacatcattcttggaaagagcatcaaggaaattgccgaggccgagggcgtacatgaggagtctgttcgccagtcgatcaagcgtggccttgagcgtatgaaaaaaactttttgattttttcattttccccacttggaaatgatgaaaaaatgtctcggtttatgaaagaagatattcttcttttcgcagataaacagcggcggccccgggcatagtccggggagccgggtggcgggtgcgctgtgactttttcttcggaagaacgagcgaacaacaccaacgccgcaactgggccgggccaacccacggccacgatccggcataggacaggctggccgcttgtccctccgggctgtccccttatctgcgagggaacgccgctttgagcatggttgtctttggacagggcaagaaaatgggagcggcgttctctattttatacttacatggagtgaggcaagagggcagcatcgtttgggtgctgccctcttgcgtttccccatgatatgcgggaggcgtatcctatttttgataaggaggttttaccgtgagattaacggcaaaggaactggaacaaatgaaaagcgttgacatcggcgcagtggctcccgagtccctgccggatgtgagcggtatgatctttgacacctctctcccccgggaggagcggatcgctctgtttttgcaggcggtagaaaatccatactgcttttgcatcggcgggatcggtgtaaaaattgaatttgcggaaagcgggccgtccttgcaggacacgctgacggacttccttctccggcaaaaaagcgggctgtaacttcggttatggcccgtttctactttgagacaaagtgtcccgaggcggaggcatccttgttgtcccgcccgagcagaggtataatatagatgtaatgtgatagggaaggaggaacaatggcacgaacaaaaaacagaggattgcaacagagtttctctccctcttataccgtccgccgctggcggctgggcgcatacatccggctctccaaggaggacttgaaaaagggaaaggacgacagcaacagcgtcatcaaccagcgtgatctgctcaatgacttttaccagaagcatatcggagaatttgaaagtgtttccgaatatgtagacgatggacacacaggaacggacgccaaccgggagaacttccagcggctcctttccgatgtaatgagcggaaaaattaactgcgtggtagtaaaagacctgtcccgcttcgcacgaaattatagcgatgccggaagtttgatcgataacctgtttgttcaaatgggtgttcgctttatcagccttgctgagaatgtggacagctacaagaaccccgacagcgtttcaaatatcatcgttcccattacaaacgtgatgaacgataattactgctatcagacttccaaaaagatccggcaggtatttgattacaaacggcgcaacggccagtatatcggagcatttgctccttacggctatgtaaagcacccaaaggacaagcacaggctgattgttgatcccgatgctgctgaaaatgtcaaactcattttcacaatgcttattcaagggtcatcaaaacgtgctatcgcgctgtacctgaacgaacacggcgtaccgagcccctcggcttacaaggtacaaaagggcttgcctgtttcgacaagagggtatgacgatcctatgtggggagtccgcatgatccactccattcttaccaatccgacctacaccggggatttagcccaaggccgaagccgggtgaaaagctacaaggtacaccagattgaagctgttccacgcgaggaatgggtggaagtggctggaacgcatgaggccattatcgactatgaaactttcgacaaggtacaggctctcttacagcgtgatacccgtacttccccgaaaggccgtgaggtacatttattcagcggctttctgaaatgtgccgattgcgggcgggccattacccgatgcgttggcaagaacaacaatgtatattattcttgctcaacctacaagaaccgttcccggacagcctgcaccatgcactcaatcaagcatgaacggctggaggctgctgttttgttcgctgtacagcatcaggtacatttggctgtttcctactcggaaatcgtcacgcagatcaattccgctccaatcaaaaaaagccagtcttaccgactggacgatctgatagctgcaaaagagcgggaactgacaaagataacacgctacaagcaatctctttatcaggactggaaagacggtgaaatcacccagcaggaataccgggatatgaaggctgactatgaacggcagacttctgatatttccgcggtgcttacccggctgaacgctgaacgcgcagaactggcaaacggtgtggacaacgagcatcctgcactggtagcctttatgaagtatcagaacattgaagccctcaaccgtgaaatcttggttgaacttgtggactatatcaaggtctatgaaaacggcaatatcagcgtgaaattcaaatttgctgacgagctccgcaagattgccgagtacattgaaatcaacactacggaagataccacagtagcgggctaacccccgctacgaacccctttgacagtgtgttttcctaataggcgctaatcatatgcaacggcagtggtactcctggtagtagtacttctgatcaatgccggttccggctggatcgcgaaaaaactgacaaagaggtaagaaaatggagaaagataaatttacgataaaagatctggatttgttttacggggattttcaggcactgaaaaagatttccatgcatatcccggaaaaagagattactgcatttatcggaccttccggatgcggaaaatccacattgttaaagtccttaaaccgaatgaatgatctggtagaaggatgtaagatcaccggaacactgcttctggacggtgaaccgatcaaccagatgaaaaatgtcaatctgctgagaaaacgggtaggcatggtattccagaagccgaatccgtttcctatgagtatctatgataatgttgcctatggaccgagaacacacggaatccgtaaaaaaagcgaactggatgcgattgtggaagattctctgaaaaaggcggcaatctgggatgagacaaaagaccggctgaaaaagagtgcacttggtatgtccggtggacagcagcagagactgtgtatcgccagagcgctggcggtacagccggaagtccttctgatggatgagccgaccagtgcgcttgatccgatttctactacgaaaatcgaggatctggcactggaactgaaaaaccagtatactattgttatggttacccataatatgcagcaggcagccagaatctcagacaaaaccgcatttttccttctgggagagatggtggagatgaatgatacagaaaccatattttcaaaaccgcaagataaacggacagatgattatatcacagggaggtttggctgatggcaagacaggcatatcaggagcagctgcttaagctgaatggagaattgattgagatgggtgacctctgtgaggaggccatgtcactggtgatgaaagcactccgggaaaaagacgaggagattgcggtcagtgtacataagattgaacagaagatcgatcaaaaagaaagggatatcgaagccatgtgtatgacactgctgcttcgccagcagccggtatccggggatctgagaagtatctcttccgcacttcgcatgatcgcggatatggaacggatcggagatcagacagcagatatcgcagatgtatccaggcatctgacagattttcagctggaagtgcatccgaagatttttcatatgggtaaaattgcatccaagatggtcaatgacagtgttaatgcgtttgtacgcaaggatgacaaactggcagcagaagtgattgccacggacgatcaggtggatcggctttttgaagagatcaaaatggaactgatggaagaaattgcaaaaaatccaaatagttccggcagtgaactggacgtactgatgattgcaaaatatatggaacgtattggcgatcatgccgtgaatcttggagagtgggtacactattatgtctacggtgaaaaagtagaaggtaaagactgacagttatctgagacgaccggaacaaaaagaaaaatcccgtacatgacaaaaaatcgataaacgattctgtcatgtacgggatttttatgcggtcacaaaccaaggtctgtgaccgtggtgtttcttacagttctttaccgtcaaccacttcgtcatattcagcactgtctaacagttcgtcgaaagcatcggcagcgatttcatattcgtcatcgtcttcgatgttctcgagagttggctgctgaccttcttcctggaagaaacggtataagaatacttcaccgtcctggttttcgccgttctcatctaatggcagcagagcaatatatttatgctcgccggcagggaagatggtcaggacggcacagaccagttcactgtcatcgtccagggtcagggttacggttgcattcgggttggataaatcaaggttgcagtcggacccgcaggtatcgcaggaaccggtgcatgcgctgttttccagatcactcataataataaaaacctcactctttcttaatatggtagctgttctgtatcagcataaagattgcagaaaaaacaactatatctatgtatactttaacagaagaaatcataaaaagcaatggattttctattgacgggagaaaaatgtagttttatacttaacatatgttgtcgaagcagactggctccggcagaatgtaagaatgtaaaaatacattcgagaaaagcaggaggagagatattatggatatcaaatttattaaaagagaagaactgcaggaaaaaccggatcagaagaaacttggtttcggcaaatatttcgctgattacatgttcactatggactatgatgaaggaattggctggcatgacgcaaccattcgtccgtacggaccaattgagatgaatccggctactgtagttttacattatgcacaggaaacatttgagggactgaaagcatacagaagagcagatggccagatccagttattccgtccggagatgaatgcacgtcgtatgatcaattccaatgaacgtctgtgtatggcaactattccggaagatatgtttatcgaggccgtaaacgcactggtaaaagcagaagaagactgggttccgtctgaaccggaaacttctctgtacatccgtccgtttgcatttgcatgtgagtcttctctgggcgtacacaaatcaaaagcatataagttcgtaatcatcctttctcctgtaggtgcttactatgcagaaggtctggctccggttaagatcatggttgaagatgaatatgttcgtgccgtacagggtggtaccggatttacaaaatgtggcggtaactatgcaggatctattatcggtcaggtaaaagctgaaaaatatggttgctctcaggtactgtggctggatggccgtgaaagaaaatatgtagaagaagttggtgcaatgaacattatgttcaagatcgacggcgaaatctacacagctccgatcgaaggaacagtacttcctggtgtaaccagagattctatcattcatatactgaaagactggggatacaaagtaaatgaaacgcatctgtctgtagatgatcttatgcaggccggaagagacggaagactggaagaagtatacggaaccggtacagcagcagttatctcccctgtaggcgcactggtttacaaaggagaagaaatcacaattaataacttcaagattggtgaactgactcagaaactgtatgattatctgacaggcatccagtggggtaaagaagaagacaaatacggctggacaagactggtaaaataataaagaataattgtgctgatatgcataaggaatataaggaagggctgtcgcagaagataatgatgcgagagctctttctttattgcgttgcatattaataattggttcggtggaccaattttgattatgttatcaaagagttaaagattatgattgcatgagaaaaaaggacgactgttgatataggacagaaagtcagtgagaaaagagcaggagaacaatatggaacaaagaaaaacaccattactggatgcgattgttgattatacaacaaacagaccggtatattttaagattccagggcatcgatacgaaaagggaatcagtccccgctggcgacagtggacaggagatggcatcttccggtttgatctgacagaggcagagggactggatgatctgcatgaaccggaaggcgtgatccgggaggcacaggagctggcagcggaggtatttcaggcaaaaaaaacctattttctggtcaatggaacaacctgtggaaatgaagcgatggtgcttgcctcggtaaaagagggcgagaagatcatggtagcaagaaatgcccacaaatccgtactgatggggctgacgcttagtggggcggttccggtttatctgatgccgaagcaggatccggtcaccggcctttggggaagcctggatccggagactgtggaagagggattccgacaatatccggattgtaaggctgtttttctggtaagtccaacctattatggtgtgtgcagcaatatccggtccattgccgatatctgtcacagacacggggccttgcttttggtagatgaggcacatggaggccatctgtattttcagaaggaagggacagctacggagacacttccccggggagcaattcttcaggatgcagatatgtgcgcgcagagcatgcataaggtgacgggatctctgacccagagttccctgttgcatgtgggaagtgaccgggtggatcttggaagactggaagcctgtctgcatatggtgcagagtaccagtccgtcctatcttctgatgacatccctggatgcggcccggtatgagctggctcttcacggggaggagatgctgcaacgaggtctggcactggcacagatggcaagagaagcaatgaaaaagattccgggaattacctgtgtgggagaagcatctcgcggaaaagctatctataacctggatctggtgcgtctggtgatctctgcttcggatcttggactttccggttatcagctggcagaccgcctttatgagaaatacaagatcggtatggaactggcagatgatcgatatgtggttgctgttgtaacatatgccaatgaagagagtgatatgaggcagctggtggaggcactggaagacatcagcaggaaaatgacgggaaagaacaatgtggatgttgtgaatgcggagacacgtctgattccaccgattccaccgatgatcgatactccgcgacaggcattttttaaagaaaagaaacggattccctggcgggaagcaaaaggaaagattgcggcagaagcattaattccgtatccgccgggaataccactggtcaatccgggagaactggtgacggaggaaatctgggaatatatggaagaatacagaaaaaaaggacttcactttcacggaccatcggatgcttcactggacagcttttgtgtgttataataaaaccagacttgacaaaacaggaggacagatgtttgaaactgatatcatggaatgtaaatgggctgcgggcctgtgtgacgaaaggattcaaggaacgctttcaggaattggatgcaggcattttctgtattcaggagagtaaactgcaggaaggacagattgagctggaacttccgggatattatcagtactggaattatgcagtgaaaaagggatattcaggtacggcgatttttacaaagcaggagccgctgtctgtgcgatatggaatcaacatcgaggaacatgaccaggagggacgggtgatcacactggaatacccggattttttcatggtgaccgtatacacaccaaattctcagaacgaactggccagacttccttacaggatgcaatgggaagatgattttcttgcatatctgaaaggactggagaaagagaaacctgttattttttgcggtgaccttaatgtcgcacactgtgagcgagacttaaagaacccgaaaaccaatcggaaaaatgccggattcaccgatgaagagcgtgcaaaattctcaagagtcctggaatccggtttcatcgatacttttcgttatttttacccggagctggaaggaatctactcctggtggtcttatcgattcaaagcgagagaaaagaatgcaggatggcggatcgactatttctgtgtgtccgaaagcctgaaagaccggctggaagatgcgaagatccacacagagatttttggatccgatcattgtccggtagaactggatatttgtttatagagggggaaaaagatgggaacagaaagaaaaccctggaagatcagtccgggtgatccatcccgtccgggagtgaccggaaaaggaaaccggtataattttgctgtggataccagaacaggagaatcaccggaacttctgttttatagggacgggagagaagaacagcgtatcttgctggatgagacttatcgcaccggcagacggtatgcggtgatggtcgaaaaaccggggctgcaccagtatgagtatcggtaccggcagggagagataacatttactgatcctgcggcaagactggtgacgggggaaccgtgttttggtgaaaaagcggaaggggaagtgatgacctcggcaaaagtgctgagaggatacaaggtgatgccccttgcggaaccgattccctatgaaaatatggtgatttataaggttcatccgagaggctacacgatgcagaagacctccggggtgcgggcgaagggaacgtttcagggactcgcggagaagatcccgtactggaaagaactggggattacctcgctggaactgatgccgtcgtatgattttgaagaatatccgtcaaaaaccggcgaaaaagaccggtatgggtatgataaaacgatacggtatcaggaagaaaaacttaattactggggatatacgaaaggaaattattttgctccgaaggcatcttactgtaagagtaatcagccggagaaggagctaaaaagctttttcagcgctcttcatgaggctggcatcgagtatctgatggatttttattttccggtggagacggatccacagatggtgttggaagtgcttcggttctggcggatggaatacagggtggacggatttgtcctgatgggtgatggtgtctggatggaacttttggcaagagatgcggtacttgcagatgtgaaactgatcggctgtggctatgatatgggtggaatcgcaagaaaactgggcggaaaaaaacgtctggcagcctgtcacagcggattccagagcgtgatgcgccgttttctcagaggtgatgaggatcaggtgaatggattcttatattacaccagagaaaatccccaggatcacggtgaggttcattatctggcaaaccacgatggttttaccctggcagatatgaccagttatgatacccgtcataatatggagaacggtgaggaaaaccgggacggcagtgcgtataattacagctggaactgtggtgtggaaggcccgacaagaaaaacgtcgattctggaacttcgaagaagacagatgaggaatgccatgctgctgttgtttttgtcacaggggactccgttgttatacggcggtgacgaactggaaaacagccagatgggtaataacaatgcatattgtcaggacaatgaaatcggatggatagactggaaaaagggcagatcttacagccagtttaccgggtttgtaaaggatctgatccgttttcgaaaagatcatccgatcctgcatatgccacaggagctacgcccgaccgattacaaatccctgggctggccggaaatctcctatcattcggaacgcgcctggtttgcagacacggagagcagcagccggcagatcgggattctgtactgtggtggttatgcaaaagagatgacagggaaagaagatgtgtttatctatgtgatctacaacatgcactggaatgaacacaaatttgccctgccggatatcccggaggggatgcgatggtatctggcgattgattcttcgaaaaaaaacagtgtctgcccgaaaggagaggaactgctgttggaagagaaaaaatcaatctatgtaaaaccgcggacgatactggtattattaggggatgctagagaaccgggggcaaaagcctgacgcaagcttgccgacaggaaggtttctgccttcgtactcatcaaaaatgtgagtaagtgagcaaaatactttttgcccacaaaatcttagaaaaacagggagataagtaatatgaacgcatggggacattttaagacgatcacatcccataaatttctggttatgaagtattgttttaaggtgggattgtataagcagggatttttgcatgacctgtcgaaatattctcctaccgagttcatggtgggagcaaaatactatcagggaaccagaagccccaacaatgcagagagagaagccaccggagtatctacttcctggctgcatcacaaaggaagaaacaaacatcattttgaatattgggtagattacggaatcggagcggagcatgtacttgccggtatgccgatgccaagaaaatatatcgccgagatgatcatggaccgcatcagcgcatcacggatctatcacccggaaaactatacagatgcctcaccgctggaatatttcctgaaaggaaaagaccgactgtggttcattcatccggataccagcgcacagattgaatatctgctgcggatgctggcagtgaaaggggaggaaaagaccctctggtatatcaaacatgtgtatctgaaaaataaaggcagattcggcggaagcggatccacctatgtaagcccggagagaggggtacctacccaaaaatgaagaaagaagatggccggtattgttctgcgagagcagagcgatgccggcggtcttttttattgcgttgcatttctgccacagttctattgcttatgtagcttgacaaaaatgaaaagatgacatatactttgaaaagataataatttgaagttcaaaataaaagcgaagaagaggaacatatatgacaacgaaaattataggaacaggaagttatctgccggaatatgtggtgaccaatgatgatctggcaaagctggtggataccagtgatgagtggatcgcttcccggacggggattcgaaatcgacgaattgctaccaacgaaagtggagtagatatggcagcagctgcggcagaggaagcattaaaagatgcagggatggacggatcggagattgatctgatcctggtggccacgtgcagcagtgattttcagtttcccagtactgcatgtctggtgcagaaagccatccatgctacgaacgcggcggcgtttgatctgagtgcggcatgttccggttttttatttgccctgcataccgcacatgcgtatatctgtgccgggatttataaaaatatcctgctggtgggcgtggaagcgctgtctaaactgatcgactggaatgaccgttccacctgtgtcctgttcggggatggtgccggagcggcggtggtaacggcggcagatcatggaatggaagggtttgttcagtggtcggacggcgtgagcggtgaagtacttacctgcccgggaaggaaaatagagaatccatggaaagagaatgattctgaaactgaatatattcagatgaacgggcaggaagtctttcgatttgcagtgaaaaaggtcccggaatgtatccgacaggtaacagaaaagaccgaaactcagatagaaacaatcgactggtttattcttcatcaggctaacagcagaatcattcagtccgtggcaaagcggcttggggtgccggaagaaaagttcccgatgaatatggagcagtacggcaacacttccgcagccagtatcccgatccttctcgatgagatgaacaaaaagggaatgctgcagccaggacagaagatcattctctccggatttggtgcggggctgacctggggtgcggcgcagatagagtggtagaaggaaagcaaaagaaaaaaatacgggagcaacggaaacttggataagaagagttccgttgctcttttttatattgcgtgggtaacaggtgaaagtttgtagttgcttcagaatgctgaaaaataaaatcagaaaaatgagaaatactatacaataagtaccttgacaaaatacccacagggggtatatagtaaagatactccccgtgggtatatgaaaaataaatgaggtgatcaattgaaagaacagaatcctacacgaaaggatgaatctataaaaacagataacgaaatatgtgagatgtgtgcaaaagaaagtgaagaaccggaaaaaaatattgcacaggaagaaaccggatgctgctgccactgcaagaccacagcccgttcccaggatgagcgaaagaagttgatgaaccgtctgagccgaatcgaaggacagattcgcggcatcaaggggatgcttgaaaaagatgcctactgcaacgatatcctgattcagtccgcagcagtcagcgctgcaatgaatgcgtttaaccgggagttgttgtccagccatattcattcctgtgttgtccgggatattcgtgagggaaaagacgaagtagtggatgagctgatggcaacactgcagaaattgatgaaatgaagagtgcgagagtacgaagtacggagcaatccggtatcgataaaaaagctattatacaaatttatgtacagaaagggtgaagcaagacatgagacaatacaacgtaaccggaatgagctgcgccgcctgcagtgccagagtggaaaaagcagtgggcaaagttccgggagttgcctcctgctccgtcagccttctgaccaattcgatgggcgtggaaggagatgtaccgccggagcagatcattgcggcggtggaacaggcagggtacggtgcctccgaaaaaggagccggagaaaagaaacagtccggagccgatgcaactgcactggaagacaaagagacaccggttttaaaacgcagactgatcgcatccgtaggatttttactggtattgatgtatttttccatgggacatatgatgtggggatggccgctgccggcgtggtttgaggataaccatatcgcgatggggctagtacaactgcttctggcaggtattgtcatggtgatcaaccagaagttctttatcagtggttttaagagcctgtggcacagatccccgaacatggatacgctggtagcgatgggatcgatggcatccttcttatggagtgtgtatgttctctttgcaatgaccagggcacaggtggacggtaatatggaagcggtcatggattacatgatggatttttattttgaatccgcagcaatgatcctgacactgatcaccgtaggaaagatgcttgaggcgagatctaagggaaagaccacggatgcactgaaaggccttatgaatctggcaccgaagaccgccgttctcgtgaaaggagaaaaagaagtcaccgtaccgatcgaacaggtagaaaaaggagatatttttgtggttcgcccgggcgagagtattccggtggatggaaagatcctggaaggacacagtgcaatcaatgaggcggcactgaccggagagagcatcccggtggataaagaagagggtgacctggtatcggcagctacgatcaaccagtccggatttatccgctgtgaggcaacgagagtgggggaagataccacattgtctcagatcattcagatggtcagcgatgcggctgcgacaaaagcgccgattgcgaagattgcagataaagtatccggtgtatttgtaccggtggttatcctgatcgcggtagttacgacgatcgtatggctgcttgccggacagactttcggctacgcgcttgcaagaggtatatccgtactggtcatcagctgcccgtgtgcactgggacttgccacaccggtagcgatcatggttggtaacggtatgggagcgaaaaatggtatcctctttaaaaccgctgtttcgctggaagaagccggaagagtgcagattgtggcactggataagacaggaaccatcacaagcggggagccgcgggtaacggatcttgtgtgcgaaccaggatatgatgaaaaagcactgttggaactggcaggggcactggaaaagaagagcgaacatccgctggcgaaagctgtattgttagagattgcacagcgaaaaatctccaccaaagaagtggaaaacttccaggcactggcaggaaatggtctgacaggaacgctggagggacacagactgcttggtggaagcatgaaatacatcagcagccaggtgacagtaggaaaacaggtaaaaaatcaggcacagatactggcaaaacagggaaaaaccccattgctttttgcaaaggatgacgtattgatcggtatgatcgccgttgctgacgtgatcaaggaagacagtccgaaagcggtacaggaactgcagaatatgggtatccgggtcgttatgctgaccggggacaatgagcagactgcaaaatcgatcggtgcacaggcaggggtggatcaggttatcgccggagtccttccggatggaaaagaagccgtgatccgcaaattaaaagagtacggaaaagtagccatggtcggagacggtatcaacgatgcgccggcactgaccagagccgatatcggaatcgccatcggcgccggtgcagatgtggcgatcgatgccgcagatgtagtactgatgaagagccgtctgagtgacgttccggcagctgtccggttaagccgtgcaacattgagaaatatccatgagaacctgttttgggcatttttctataacattatcggtattccactggcagccggtgtgtggatcccgatcttcggatggacactgaacccgatgttcggagcactggcgatgagcctgtcgagtttctgcgtagtatcgaatgctctgcgcctgaatctttttaaagtgaaagattcacacagagatcataagataaaaaatgaagttacccttccgcaatgggaggcatcgaaaggagaaaagaatatgacgaagacaatgacaatcaaaggtatgatgtgcggacactgtgaagcaagagtgaaaaagactctggaagaactggaacatgtaagcgaagcacaggttagccatgaaaaaggaactgcagtggtatgcatggagacagaagtagcagatgaggttctgaaaaaagcggtggaggaccagggatatcaggtggaaaacattcagtaaaagtgaagaacagatctgaaagaaagaaggaaacaaaatggtaaagacaatcgttggcgtggacggcatgatgtgcggcatgtgcgaaagtcatgtgaacgaagcggtgagaaatgcatttccaatcaagaaagtaagctcttctcacggaaagaaacagacagagatcatctctgaagaatctctggatcatgaaaaactgaaagcagccatcgaaaaaacaggttatcaggtaacttctgtgacagaagaaccgtataagaaaaaaggattttccctgttcggaagatgagaatctgttaaagatttatagcattggaagtcaaaaataaataaaaatcaaaacctgcaggcatgggaactccggaaaatgacggaacttccatgcctgtaaaactatagtacactttttgaaaaaatcatgctataataaaaaactgaaattatacgacagaggacgaagagcatggaacaggcagataatttattgttgcggattcaaaaatatgataagactttcagcaaagggcagaaacgtctggcagcgtatgtgctgaaaaattatgacaaagcggtatttctgacggcatcgaaactggggaaagaagtgggcgtcagtgagtcgacgaccgtgcgatttgccacacagctggggtacaaaggatttccggaatttcaccgggcactggaagaactggtgcggaataagttgaattcgatccagcgcatgaaggtgacctacgggcatgtaccggaagcagagatcctggatacagtgtttcagtcagatatcgagatcatcaagctgacgatggaacacatcgatcatgcggcatttgagatggcggtggagacactgctttctgcgagaactatctatattatcggtatccggagctgtgcacccttagccagctttttgagtttttatctgaatatgatcctggacgatgtgcgtctgatccagacgagcagcgccagcgagatctttgaacagatgatccgtatcggagatcaggatgcaatcatcggcatcagttttccacggtattccatgcgaaccttaaaggcaattgagtttgccaacaaccggaatgcaaaggtgatcacactgaccgacagtgtgcattctccgatcaatctgtattcatcctgcaatcttatcgcgagaagtgatatggcatccatcgtcgattctcttgtggcaccgttgagcgtggttaacgcactggtggtggcactttgtatgaagcggcagaaagaagttgtgcatacccttgagactatggagaaaatatgggacgaatatcaggtatacagcaacgatgagatggaacatgcggacgatacgatcaagatgttgaacccggaacaggaggaccataaaacatgaaacgatttttgattatcggcggaggtgcggcgggtatgctggcttctgtctacgcggcgcgaaatggtatggaagtgcatctgtttgaacagaacgaaaaactcggaaagaaactttttattaccggaaaaggcagatgcaactttaccaacggctgtgccacagaggaactgtttgagtccttcattaccaacccgcgctttttatacagtgccgtctacgggtacacgaactacgatgtgatcgacttctttgaaactgcaggtgtaaagacaaagatggagcggggtggacggatgttcccgttgtctgaccattcttcagacatcatcagggcgctggaacagcagatgaagaaagccggtgtgaagattcatctgggaagccgggtaaaacggcttcttgtggaaaaagaagaagacggaaatgcaaggatcaccggaatccagctggataacggagaaaagatccggggcgaacaggtactggttgccactggcggtaattcttatccgtccacaggttccaccggggacggataccggatggcaaaagagagcggtcataccgtaacggatctgcagccgtctctggtgccgatggtgacggctgaggaatatattccgagattacagggactgtcactgaaaaatgtgacattgtctttgtatgacggaaaaaaatgtgtctacgaagatttcggggaaatgatgtttacacattttgggattaccggcccgctggtgttatcagccagcgcaaaggtgggaaaactgttaaaaaagaagtatctgacggcgaggatcgatctgaaaccggcactgaccgtagagcagcttgacgcaagactgctgcgtgaattcgaagaaggaaagaacaaacagtttaaaaacgtggccggttatttattcccggcaaaacttcttccggttatgctggatctcggcggcatcgcaccgggaaaaaaagtgcatgagatcaccagagaagaacgtgccggatttatcgaaaagacgaaagcctttccatttaccgtgaccggactgcggggcttccaggaggccatcatcacaaaaggcggcgttcaggtaaaagaagtggatccgaagacgatggagtccaaaaagacaaaagggctttattttgccggagaagtgctggatctggatgcactgaccggtggttataatctgcagatcgcctggtcaacggctcatgcggcggcaatggcggcagctgaggcagaaagataaaagcagaaaactgcttggtaagaaggatattgcaggatattttaggacaataagactgtcagaggatgaagtggttttgataaaataataaaaaaacggaatattccggggaaagaggaaaatatatgagttatgcaatcgcaatcgacggaccgtccggtgccggaaaaagcaccatcgcaaaaagagtggcaaaagaactgtcttttatttatgtagataccggagctatgtaccgtgccatggcactgtatgtgctggaacagaacattgatccgcaggatcaggcaaaagtagcagcagtctgcccggatatcgatgtgacgatcctttacgaagacggcgtacagcaggtactgttaaacggaaaaaatgtatccgctgagatccgtcaggaaattgtaggaaataccgcatccaagatctccgtgatcaaagaagtgagagaaaaactggtagcattgcaaagacagctggcagcaaaagaaaatgtagtcatggacggaagagatatcggaacacaggtacttccgaatgcgacagtcaagatttatctgaccgccagcgcgaaagagcgtgcgaagagaagatatctggaactgcaggaaaaaggaatgccgggtgaactcgatcagatcgaggcggatatcatcgagagagataaccgcgatatgaaccgtgagatctccccgcttcgccaggcagaagatgcagtgttggtggacgcgtcttttatgggaatcgaagaagtgaccgcggcagtgattgcagaatttgagaaaaagaaacaggcataaggggtgcatatggaagaaagaaagattctggtagcccgtaccgcgggattctgtttcggcgtgaaacgggcggtggaaaaagtatatgaacaggtcaacatgggcaaacagaatatttacacctatggaccgatcattcataatgaagaagtggtgacggatctggaaaaaaaaggtgtccgggttctggaaaatgaacaggaactgaaaaatcttatggaaggaactgtggtgatccgttctcatggcgtaccgaaagaaatctacgaagtgatcgaagaaaaagggctgaaatgtgtggatgccacctgtccgtttgtacggaagatccataagatcgtggagcgggaaagtaaagcaggacgccatattattattgttggcaatgatactcatccggaagtggaaggcatcaaaggctggtgtgaaggtccggtgactgtgatatccagccacgaagaagccgaaaatctcgcctttccggagggtgaaaagctgtgtgtggtgagtcagacgacatttaattacaacaaatttcaagaattagttgaaatttttgaaaaaaagaggtatgataaagttgttttaaatacgatctgtagtgcaaccgaggaaagacagatggaagcacggcagattgcctgcgaagcagataccatgattgtcattggcggcagacatagttccaatacgcagaaattatacgagatttgtcgaaaagagtgtgaaaatacttactatatacagacacttgttgatttggatactaagccttttcaatgtattggttgcgtaggtattacagcgggggcttccaccccaaataatataattgaggaggttcaaaaacatgtcagaattaagttttgaacaaatgctggaagaatcattaaaaacaattagaaatggggaggtagtcgaaggtacagtaatcgacgtcaaagaagacgagatcattttaaatattggttacaaagctgatggtattcttacaaagaacgaatacagcaacgattcctctatcgaccttacaactgtagtaaaacctggtgatactatggaagtaaaagtcctgaaagtaaacgacggtgaaggacaggttctgctgacctacaagagactggcagcagaaaaaggaaacaagagactggaagaagctttcgaaaacaaagaagttctgaaagcaaaagtttctcaggtactgaatggcggactgagtgtagtgatcgacgaagcaagagtattcattcctgcaagtctggtttctgatacttatgaaaaagatctgagcaaatatgcagatcaggaaatcgaattcgttatcacagagttcaacccgagaagaagaagaatcatcggtgacagaaaacagctgttactggcagcaaaagctgaacagcagaaagctctgtttgagaagatcgcagttggcgatgttgtagacggtgttgttaagaacgttacagatttcggtgcattcatcgatctgggcggagcagatggtctgctgcatatctccgagatgtcctggggaagagtagaaaacccgaagaagatcttcaaagtcggcgagccgatcaaagttctgatcaaagatattaacggagataagatcgcactgagcctgaagttcgaagatcagaacccgtggctgaatgcagatgaaaaatatgctgtaggaaacgtagtagaaggaacaatcgcacgtatgacagacttcggcgcattcgttgaactggaaccaggcgtagatgctcttctgcatgtatcccagatctccagagaacatgtggaaaaaccttcagatgttctgagtgtaggtcaggtaatcacagcaaaagttgttgatttcaacggcgaagagaaaaaaatcagcctgagcatgaaagctctggagcctgcagctgaagaagcagcagaggaagagtaatctgtagctgaacaaaaagatctgacagatcataaatttatgtaagcaaaagataagccacccgatatgcaaaacagtatgtcgggtggtttttatgcatatggcaaaacgaaatccgtgattgcgtgtgtgacaatcgcggattttttctatattataatcaaacattcaaaaatgtttattgtagcacatgagaaagcagatggtttaagtattttagaagttgttcctgatcttcatctaaatcttccggcaaaagaaaccagctgtttttctccttacgctcatcccggaaagccggagtgaaaagttcttcgtactggggataaaagcatccgtttacttttttacagcagttgtccggcgttgctttctcgcggtgatctttgtcaacataagcccccacactcttatgaatcgcctcgtcttccattggaagataatagtaatctttataattgggataaaagaattttttacatcctgcctccggacggatctctaagagaagtttttggggagttacgcgaagcacaacgtggggtagttccttttcaaagctgacaggaaatggatgttcaggctgcacagaaaggagcaaatttccttccggtgtatgagtgcatgtgataaattcatgacaatttcctgtccataaagtacggatcgaaaagagcggcagaagtttcagcatcccttctacatcttctttgttatgcagacaaagtatttcaagcaggtgctcatcaccactcaacagatattttttatatacttcaataagttccccaccactgtacaggtcttcccggaaaagtccggttgcatattccagatctttctgacgcatgtgctccagatgcaggatcttttttaagggggaaaacagttgatacagatccagctgccgggttccctcccagggggcaggcagctgataaaaggtgtatttatgcatcaggtaagggacatcaaaggtagttccgttatagtggaacaacagtttcctggtggagagaagttcggaaaaagcaagaagcacttctttttcttcgccgggtttctggcagaaccactgcctgtgaatccagatttcattttcataaaaaacagctccaagaagataaagatgagaggtcttccaggataatcctgtggtttcaatatcaaagaacagacagttttccggagaaagttcttccagtgtcaatatgtaatccggtaataccaccgggtaatcttttagcagcatatagtgtcctttctgtgagtgtgttaataaattgtcaaaatataccaaaaataatggataaaacataccaagtatctaatattatacacaaaaaaataaaaaaaacagtattttttttagaaataataagctataatggtaacagtgatatgagaattttatcataaataaaaagaaggaggaagagggattgagttttgagattctgggagttgatctgtatcatattctcagttggtttattgtatacagctttatgggatggatctgggaaagctgttacgtatcagccaaaagcaaaaaatgggtaaacaggggatttgtgtccggaccgtttgtaacaatctatggagtgggggcggtgaccgtctacgtgatcttacgtccggtggcaggaaacatcctggaactctattttgcaggggtggcagtcgctacgattctggaatacgtgacaggtgtactgatggaagccatttttcacaccaactggtgggattacagcgataaaaagtttaactttcagggaaaaatctgtctgggcagttctgtagcatggggattttttacattgattctgttttatatatttcagccggttgtaggggatctggtggaaatggttccgagaaaaacaggaatcgtactggtctatatatggctggcgggatataccgtggattttgcattttccgcagcagcagctttcgatctgcgaagcaagatgaagaaactggatgttgtctgggacgaattccaggagaatctgcgagataccaaactgtatgaggtggcagaggaagcccgtgcgaaagcagaagtttaccggatgggacttccggttggcaagtggaacgatatgatcgaagaacgtaagaaactgttccgcgagacggtagagcgctacagtgcaaacgacagcagacttctggaaacgaaagataatatcctgggtaaatacgaagagtttgtacagaagtatggggatgtgaaaaagagtatccgtcatatctccaggagacatctccgggcgtatccgaatatggtcagcagttttgaacgtcgtcggagactgactctgaaaaagaaccgtaaacagaacaagaagagtgcgtaaaagctgacaaaatgcgcaagaatgaaaagggaggactagtgtatggggtctggaacatttagaggaggtatccatccgtatgacgggaaagagctgtcaagagaccgggtgatccaggatatccgtccgggaaaagaactggcctatcttgtatcccaacatatcggggcacctgcaaaaccgattgtaaaaaaaggtgatcgggttctggtgggacagatgatcgcagaggcagggggctttgtatccgctccggtttatgcatcggtatccggcgtggtaaagggaattgaaaaacgtttgacagcaaccggaggctactgtgatgcgattatagtggaaaacgatgaagtgtacgaatcagtagcgtttgaagaaacaaaagatatcacacaattatccaaagacgagatccgtgggaagattcagaaagcgggtatcgtaggtatgggtggtgcaggattccctactcatgtaaaactttcaccgaaagaaccggaaaagatcaaatacattctggtcaatggtgcagaatgtgagccatatctgacttccgactaccggatcatgctggaacagccggaaaaactggtcggcggactgaaagtgatgctgcagctttttgatggtgcaaaaggatatatctgtattgaggacaacaaaccggaaggcatcgcaaaactgcaggagctggtagaaggcgaagcaaatatcgaagtacagccattaaagacaaaatatccacagggtgcagagcgtatgctgatctatgcagtgaccggagagacaatcaattcttccatgcttccggcagatgccggatgtatcgtagataatgtggataccgtggtgtcgatctatgaggcagtggcagaaggaaagccactgatgcagcggatcgtaacagtcaccggagacggtgtgaatacaccatctaacttccgagcaccggttggtatggatttccaggaacttctggatgcggcaggcggtctgaagggcacagtagagaaagtgatctccggtggtccgatgatgggatttgccatgtttgattatcatgtaccggtaaccaaaactacatccgctcttttggtactgacaaaagatgaggtcagccgttcacggtctaccgcctgcatcaactgtggaaggtgtgtcagtgaatgtccggagcatctgcttccgactaaacttgcaacctttgcagaacacagaaaagaagaagcctttgtcaaatataatggtatggagtgctgcgagtgtggctgttgcagctatgtctgtccggcaaaacgaccgctggtacaggagatccgttccatgagaaaaatggttatggccaatagaaagaaaaaataagagggggatgtgaaatatgggagagttattacatgtatcctcatcgccgcatatccgttcaaaagtgaccacagattatcttatgaaaatggtaatcgtggctctgatgccggcaacagtggcaggtgtgtgtttctttggatggaaggcactgctgctggtctgtctgtcagtggcaacttgtgtggcgacagagggaatctatgaaactttgatgcataaaccgttgacgatctgggatggaagtgctgtgatcacaggattgttactgggtctgaaccttccggcatccgctccctggtggatcccggtgatcggtggtgtttttgctattctgatcgtaaaacagctgtttggtggtttgggacagaatatcatgaacccggcgctggcagcaagatgtttcctgctgttatcctttaccggacagatgactaatttcagcgcagatggcggtctggtaaaactggtagatacggtatccggtgccacaccgctggcagcagtaaaagcaggagaaaaagtagatctgttaagcctgtttcttggcaatacacagggaaccatcggtgagacttctgcactggcgatcctgatcggagcagcattcttattgatcctcaaagttattgactggagaatcccgtgtacatatatcggaagttttgctattttcgtaattttgttcggcggacatggagcagacggctattatctgttagaacagcttctgggcggtggactgatgcttggagcatggttcatggctactgattatgtgacgacgccgattaccaaacggggacagctggtatacggcgtgatcctgggatgtctgaccggactgttccgtatctttggagcctccgcagagggcgtgtcctatgcgatcatttttggcaacctgctgattccggttatcgaacgtctgaccgtaccgacagcatttggaaaaggaggggtgaagcatgaaaaataagattatcaaagatgcccttgcccttacactgatcactctggtggcaggtgtggcccttggcggtgtatatgagattacaaaagatccgattgccaaacaggaagcgcaggcaaaagcagaggcttatgaacaggtatttacggatgcagcagcttttgaggcagtagagatggacgatacattgacaaagacgatccgcgatcagctggatcaggaagggtataaggcacagtccatagaagaagttatgcgtgcggaagaccagagcggagaaacacttggctatgcctttaccgttgtaacttcagaaggatatggtggagatatccggttttccatgggggtacaaaatgacggtaccctgaacggaatatcgatcctgtccatcggagagaccgccgggcttggtatgaatgcagatactcctgctttcaaagatcagttcgtcggaaaacaggtagaaaaactacagtatacaaaaaacggggcaacacaggatgacgagatcaatgccatcagtggtgccacagttacgaccaatgccatgaccaacggtgtcaatgccggtctttgtgcatttcgtgtgatggaagggggagatcagtgatgaaagcaaattcacctctggaacgtttgtataatggtatcatcaaggagaatcccacctttgtgctgatgcttggtatgtgtcctacactggcagttaccacatctgcaaaaaatggttttggtatgggtatgacgacaatggtgattcttgccctgtccaacctgatgatctcgatgctccggaaaatgattccggacagcgtgcgtatgccggcttatatcgtagtcgttgcatcctttgtaactatcgtacagttcttattacagggatttattccgagtctttacgattctctgggaatttacattccgctgatcgtagttaactgtatcatcctgggacgtgcagaggcttatgcatccaagaatgggccagttagttctctgtttgacggaatcggcatgggacttggatttaccgttgggcttaccagcatcggtatcgtccgtgagctgatcggttccggtaagatctttggtatgactgtttttaacggtggagctactatctttattctggcaccgggagctttctttgtccttgcgatgctggtggcacttcagaaccgtgtgaagatgaaaaaagatcctgccgcagctccgaaagcatgcgacgagagcctctgtgcgggctgcaccaatcatatgtgtgcaagtaagaagaacgctgagaaaggaggaacccagtcatgagagaattgttaatgattgccgtcggttcggcattggtgaataacgtagtcctgagccagttccttggcctgtgtcccttcctcggtgtatcgaagaaaatggatacggcagcaggtatgggtgcggctgtaatcttcgtgctgacgatttcttcattctgtaccagtctgatttataaatttgtgctggtgactacaggaatggaatatatgcagaccatcgtatttattctggtgatcgccgctcttgtacagttggttgagatgttcctgaaaaagacgatgccggcactgtacaagagtctgggtgtgtatcttcctctgatcaccaccaactgtgcagtacttggtgtggcactgttaaatgtacagaataattacggaatcctggaaggcacagtcaatggttttgctaccgcagtcggatttaccatctccatcgtgctgatggcaggacttcgtgagaaaatcgaatataacgatataccgaaacctttccggggaatgccgatcgtacttctgaccgcaggtttgatgtccattgcgttcttcggattttccggaatgatttaaggagggagttttatgattacaggaatacttattgctgcggctttggtaggcggcacaggactggtgatcggactgctccttggggtagccggaaagaaatttgcagtggaagttaatgaaaaagagatcgccgtcagagaacagcttccgggcaataactgcggtggctgtggatatccgggatgcgacggactggcagctgcaatcgcagccggaaaagcaccggtaaatggctgtccggtaggcggaaacgaagtggcaaaagccattgcagctatcatgggagaagagataaaagaaggacgccgcatgacagcctttgtaaaatgtgcgggcgactgtgagaactccagaaataattatgtatatgatggtgtggaagattgctcggttatggcatttatcccgggcggcggtgagaaaaaatgtcatcatggatgtctcggctacggtacctgtgtaaaggcgtgtaattttgacgcgatccgtgtcatcaacggcatcgcccatgtagataaagaaaaatgtaaagcctgcggtcagtgtgtggctgtctgtccgcatcatctgatcgagctggttccttacgagcagacagtaaaagtaagctgcagctctcaggataaaggtaaggctactatgaatgcctgtgacaaaggctgtatcggctgtaaaaaatgtgaaaagaactgtccggtacaggctattacggtgacagacaatgtggcacatatcgattacgataagtgtaccaattgcggactttgcaaagagaattgtccgagacattgtatcatctgatactagagcgtgtctgaaaaatcatttccgcaatctgcaagccccactttgcggtatattttaccctcattcggttgtcgtagcccgctacgccgccctcatttggataaaatcttccacaaactgagacttgcagctcacgaaaagcctttttcagacacgctctagggttccaaagtgaaaagcttttcgtgcttgcacgagaaagctttttgccttggaacccgccaaacatgagaaagtagcgatttacgaagtaaatcagcggatttcgaatggttgggggattgtgagagcagcaacgctgcggaacaatccgtaaattataatttgaaaggtcggccaccttgtggtatgatagaacgtagactaagggaactgttgtttggggcagttcccgaaaaaaggagtttattatgataggatacgtgaaaggcatactggaggaagcggacgaccagtgtattattgtagataatcacggaatcggctatcgaatcttcgtacccggttccgttttttctggcgcgattcccattggtcaggaagtaaaaatatatacatatctgaatgtaaaagaagatgccatgcagttatacggctttgcgacaagagacgatctgagagtgtttaaattactgttaggtgttaacggtatcggaccgaaggcaggactggggatcctctcagcactgtcggcggatgatctgcggtttgcggttctggcagatgatgcggcggcaattgccaaggcacccggtatcggtaaaaagactgcacagaaactgatcctggaactgaaagataaactggatctggaagatgcttttgaacagaaactggcaaatcagtcagcagcaggaatacctgagacagaaggagacaaccagcttcaggaagcagtacaggcactggtagcacttggctacccgaacacggatgcactccgcgcagtgaagaaagtggaaggtgcggagacgatggatgtagaaaccctactaaaagccgcactgaagaagatgatataatgagcgcaagagagcgggaacaaacgaagtttgttcatcgggagcggcgaatggcgatcatgatagctgcgaaagcagcgtcaagcaccgcaggtgcgaatcatgatataatgagcgcaagagagccagagggagtctgctcactcttggcgaacggcgaagaacaagtaagctatagtgagtagagatatgtatatggagaaaaataaagtatggaaagacgtgttatcacaaccgacatgatggaagaagacatccgtatcgagggaagccttcgtccccagtgtctggatgattatattggtcaggaaaaagcaaagaaaaatctgaaaatatatatagaagctgcaaaacagcgaaacgatgtactggatcatgtattgttttacggaccacccgggcttggaaaaaccacactggcggggattattgccaatgaaatgggagttcacatgaaagtgacttccggtccggctatcgaaaaaccgggagagatggcagctatcttaaataatttgcaggagggggatgtcctttttgtggatgagattcaccgtctgaatcgtcaggtggaagaggttctttatccggcgatggaagactatgccattgatatcatgatcgggaaaggtgccactgcccgttcaattcgtcttgatctgccacattttactctggtgggagcaaccacaagggcaggacttctgacggcgccgttaagagaccgttttggtgtgatccaccatctggagttctatacggaggaagaactacagacgattattcagcattctgcgaaagtgcttggagtagagatcgatgcggatggagccagagagatggcaaaacgttcgagaggaactccccgtctggcaaaccgtctgttaaagcgtgtgagagactttgctcaggtaaaatatgatggaaagatcacgaaagaagtggctgattttgcactggaacttttggaagtggatcggtatggtctggatcagacagaccggaagattctggagatgatcattcacaaatttaacgggggtccggtaggactggatactctggcagcagctatcggagaagatgcgggaaccatcgaagatgtgtatgaaccgtacctgatccagtacggatttttaaatcgcacaccaagaggacgtgtggcaactgagttggcatatcatcatttgggaatctaaggggttgttttttggaggattttgtttataatagaagagagtcatactggtggaacatattgataatgtgtaaatcggggtatgaatcactaacagtaaccttcggagaaatcacagaaaataactgtaaaagtacgaggtattactgtctgcaaaaacgtagtttgtttatgcagagcatacataaaatggaggaaatgccgtaatgccagcaaaaaatacaattaaggtattaatcggaggaaagatcatcacattaagtggatatgagagcgaagaatatctgcagagtgtggcttcttatatgaatcataaacttgctcagctttccgaactgccgggatataaccgacagccggtggaaacaaaaaacacactgctcagcctgaacattgcagatgattacttcaaggcaaaacatcaggcggaagtttttgaagaagattcccagctgaaagataaggaaatgtacgatctgaaacacgatctgatcgaagcccagatcgaggttgagaatctgaagaaggaaaaagaagaactggaacagcaggtgaagaagctggaacaggatatggagaatctgctgaaatagaaaagaagactgtcgcagtatctgcgatagccttttttgtaaggaggagtatatgaaggtagaattactggcacccgccggttcttatgaggctctggaagctgcatttgaagccggggcggatgctgtctatctgggcggtcagaaatttggagcccgtgcctatgccgacaatctggatcaggaacagctgatccgagcgatcgatctggcacatctgaagggaaaacagttgtatctgaccatcaatacactgttgaaaaaccgggaactggaaacggaactgtacgaatatctggctccgctttacgaggcgggactggatgcggttattatacaggatccgggtgtgatggactttgtcaaaacatattttccggggttgcatattcatgccagtacgcagatgacgatcaccggtgtggagagcgcaaagcttttacagaaagccggggcaacccgtgtggtgactgcgagggagctgtcactggaagaaattaaaaaaatttacgatgccacgcatatggaaatcgagagtttcgttcacggagccctctgttattgttattccggtcagtgcctgatgagcagcatgatcggaggaagaagcggaaaccggggaagatgtgcacagccttgccgtttgccttatcaggtttatcgggacggaaaacgcctgaataatgaccggaccgggtatgcgttgagtccgaaagatatgtgtacggtagatatcctgccggagatcattgaagcaggcgtatattccctgaaaattgaagggagaatgaaaaaaccggaatacactgccggtgtggtgtctgtttaccggaaatatctggacaagtatctttccggggaaaaaaggccgatcgtcaccaaagaggacaaacagatgctgtgggatatttataaccgggatggttttcaccagagctattacaagcagcgaaacggacggtccatgatggcacttgaaaatgaaaaaagtgccggtatcattcgaaatgaagaattatttaccagaatacggaaagaatatatagacaaaaagacgccggttctgatacggggaaccatgagcctgtataatggatgtcctgcgattctggaagtacaggcaggtgactgcagagtgacagtagaaggggaaactgtgcagacagccatgaattgtccgctgggggaagaaaggatccgcagacagatggaaaaaaccggaggatccggctttatatttgaaaaactggatatttttatgggagatgatatttttcttccgatgcagcagctgaatcatctgagacgacaggggctggaagcactggaagaagagatgcttcgtccgtggaaacagcgaaaagcaaaagaacgagatctcaaagatataccggagacagaaaaacagacaacccaggagtttctcacagctgctgtggagacagaagaacagcttgcagcagtggaaaagacagatggagttaagagaatctatgcggactgtggaatctttccggtgtctggttttgttcagaatgtggaaagatggattcacagattggaagaagaggggaaagaactgtttcttacattgccgcgaatcgttcgagaccgggaacttgatggaaggaaagagacttttcaagaactggttcagaaaggtcttggaggctttctggtgcggaatatggaaagctatggaatcctggatgcgatgggacttacctcccggatcgttctggatgcgaatatttatacaatgaacaaccgggcagaagcgttctggatgaaaaaaggaattctcggagatacggttccgctggaactgaatgcaaaagaactggtacacagaaacaataaaaacagtgaactgaccgtatacggttatacaccgatgatggtttccgtgcagtgtgtgcaaaaaacgatggatcactgtaatcatgcctgtgtacaatatgttttgaaagacagatatcagaaagaattccgcggtgtatgcagctgtgagttctgttataatacaatctacaatacgttgccaacttctttgctgaaagaaaaggaaaaagcagaaaaactgggtgtaaaggcatatcgtctttcatttacgacagaaacacagcaggagacagaaaagattgtccgggcatttgtggacgtatatctgagaggacagaagccggatgggcagatgcagacagaagagacaaccaaaggacatttccagcgaggtgtggaatagacagaaagtggaggagatgcagtggaaaatgtaatcacagaagtatccaaatatctcatcattcttctgatgatgatctatacattttcctgttttaccgtatttcggaaacgggatattgaagatcagaaaaatgtgctgcgcagacagatcgtactgatgctgtttatgaacctggtagcatatacagtgttgtttttgcaggacaacgatatgaagatgctgatgatgtacggagcagtgtttttgtttattgtcgtggtacagattctgtatcgggtgatttacagaaaaggaaatatgctgattgtcaataatatgtgtatgcttttgagtatcgggtttctgatcttaagcagactgagttttggtaaggcagtcaagcagtttgaaatcgtggttatcggtatggtactttcgtttattgtaccggtgatcgtaagaaaggtaaaaatcttaaaggatctgacctggctgtatggaatcgtgggacttgctcttttgatggtggtgcttgccatggcggcgatctccggaggagccaagctatccattgagattggcggtgttaccttccagttttcggaactggtaaagatcacctttgtatttttcgtggcaggtatgttgagagaagataccggctttaagagggttgtgatcacaactgtggtagcagcgactcacgtgctgattctggttgtgtcaaaagacctgggaagtgcggtcgttttctttgtggcatatattgtcatgttgtatgtggcaacaaagaaagcacggtatgcgctggcaggtcttgccggaggcactctggctgcggttgtggcgtattttctgtttaatcatgtacggcagcgtgtgatcgtatggcaggatcccattgcggtatatgataaagtcggagggggatatcaggttgcacagggactgttcggcatcagtgccggcggatggttcggtatgggacttggaaaaggaatgccgaatatcatacctgtagtggacaaggattttatatttgcagcgatctgtgaggaactgggagcgatctttgcaatctgcatgcttctggtctgcatgagctgctatctgatgattgtcaatgtttccatgcagatgagcaaaccattttataagctgatcgcgatgggactgggtgcagagtatgcatttcaggtatttctgacagtcggcggaaccagcaaatttattcctatgacaggaattacccttccactggtaagctatggcggaagctcggtaatctgtacgattctgatgtttgccatcatccagggactgtatattctcagagaagacgaaggtgaagaacttgaaagaaagagaaaagaaaaacgtaaaaaatcaaagaaaccaccaaaacagaacccgcctggaggaaatggactatcaggaggaactggatatcaagagaaaaccctcgaagaaaaaatccaggaacaaacagaaaaaagcctcaactggtaaggaatatacgatcattgcctattgctttgtggggatttttctagcgctgatcggctatctggtttattttaacgtggaactgagagatgaatatgcgaacagcccatataacagcaaacggcagggaacgtaccaggagcgggtaacaaaaggtaagattctggcttccgacggagatattctggcaagtacagaaacagatgcgaatggaactgaatttcggatgtatccgtatgaaaatgtatttgctcatgttgtgggatactcggataagggtaccagcggtctggaacaggtgatgaactcccagttactgacctctcatgccaatgtagcagaacaggtgcagaaagaatttcagaatcagaaaaatgttggggacaatgtctgtacaacgctgaatacaaaattacaacagacagcatatgatgcgctgggtgatcggaaaggtgcagttgtggtaatggagccggataccggtaagattcttgccatggtaagcaaaccggactttaatccgaacacgatctcagatgactgggatcagatcaatgcagatgcaaacagttcgattctcgtaaacagagcaacgcaggggcagtatccaccggggtcaacctttaaaattatcacggcactggcatactggagacagaacaatacgtttgataatttttcctttgactgtgtcggtgaagtggagaatggtgggtatacgatccactgctatcataacagcgtacatgggcatgaagattttgcaagtgcgtttgcacattcctgtaactcggcatttgcacagattggcgtggatctgaatcgaagtgagtatgtagagacagtgaaagggctgttatttaatacacagcttccgatcgatcttccatatcgcaagtgtaactttgatctggaggcaaacagtgcagatgcgctgacgatgcagactgcgatcggacagggggataccctggtatctccgatgtatatggcgatgctgacaagcgcggtggcaaatggcggcaatctgatgacaccatatctggtagaaaagattgaaagctataccggaacaacagtaaaatcctatacaccaaagatttataaaaaactgatgaccacacaggaagcttcaaaactgacagaactgatgactggtgttgtggagagcggaaccggatcggcactttccggaagaggttatacggctgcaggaaagacaggaacagcagaacacggagatgccagcagcaccacaccgcacgcatggtttgttggattttccaatgtggaagacccggatattgtagtcagtgttatcgctgaggaatccggttccggaagcgaagtggcagtgccgatcgcacagaaaatctttgatgcgtattacaataactaaaaggttgcagagttttcagaaaagaggtatactttaggcagtgagaatgttgctgaagctggaaaacagcagcaaaaagatacacaacgcattacaggaggatttgcaaatggtcgaggcaacgagctgtggcggagtggtaatatatcggggaaaaatcctgactttatacaaaagctataaaaacaggtatgaaggatgggttctgccaaagggaactgtggaagaaggagaggaatatcatgagacggctctccgtgaggtaaaagaagaagcaggagtacaggcttccattatcaaatatgtgggaaaaagtcagtacagcttcaatattcagaatgatgtggtggaaaaagatgtacactggtttttgatgtcagcgaacagctatcacagcagaccacaacgggaagagtattttgtggattccggatattacaaatttcacgaggcttaccatctgctgaaattttccaatgaacgtcagattctggagatggcgtacaacgagtatttggatttgcgaaaatctaatctctggggaaaccgcaagtatttttaaaataaatgtaactgttcagtaccttcacagttacgtgcaaaaatgcatttaaaatcaccttcggtgatggcatttttgcttgtatgtctcgggattttggcatattcatgccaaaacacctcgcggtactgtggctactgaatagttacaaataaatacatgttgaaaaatggggagggataaaagatctctcccttttccgcataagaaaggggtgtttttgaaaacaggatgctgaactggtcgaagaacttatactatggagagcaggcaaagaaaaaagcaaccaggatccgctggcgtgtggaacatcgaagaccccagtatgaggtgtacctgatcactctggcacagaatccggagaatcagctggaaattataggagccaaccaaatgttgcagaaaatcgtgtatcgaagatgtccggagattatcggaattgcatgtggctatggagaagcactggaactggtccggcagcttgccgaggctacatataaaatgcagaaaaacggagacatccgccgttatctcggcagacaacaggaggatgaatcatgtatgtaatactgacaattttaaaaattctgggaatcatcctgctggtgttactgggattgttattggttattgtgttttcggtgctgtttgttccggtaagataccgtctggagggagaaaaatcatcttcgggatggagcgaagcaaatggaaaagtgaaggtttcatggttactgcatctgattcatctgcgaatacagtaccaggagaaagaactggactgggagtgctatctttttggtgtaccactgaaaaaagccggagcggctgtcagagagtggaaaaagaagagaagaaagaaaaaggtacaggagcagaaagaacggagaaaaaaagcagtacagcagaagaatgaaccggaaaaaagaacagctgcgaagaaaaaagggcagaaaaaaccgttacagatagaagaaaagacacgaacggctacgaaagagcaaaaatcgacagaaaagcagacgaaaccagagaaatcgaagacggctgagtcggaggcgaaagagacagaactaaagacatcagaacgaaaacagccggaaaaagaaaaagtctccgacaaactgtcacgattctggaacagatgtaaaaaaatcgtcggttcgattttgaaatttccgggaaaactaaagaaaaagcttacaaatatcaggttaacattccggggattctgtgataaaattaagcgatggcggacgttgtggaacgaagatagtacccagactgcactccgttttctgacagaaaacggaagaaaactgatccgccatgttctgccacgaaaaatcaagggatccatcacctttggatgcgaagatccggcactgaccggacagatactgggtgcagtggcgatcgcttatccactatacggaaagggcgtggcagtgtatcccagatttgaggaaaagattctggagggtcagcttcagatgaaaggacggatcgtggcagcctgtctgctgtggcaggcatggaagatctatcgaaacccggatgtacgaaagactttgaaaaagatcagataaaaggaggtttttgctatggcagaaaacagttttcagaatacagtagaagcactttttaaaggaatggacagctttatcaccactaaaaccgttgtcggtgatgcgattaccgtaggagatactattatcttacctctggtagatgtatctttcggcgtgggagccggagcatttgcagaaggcaataaaaacaacggagcaggtggtatgggtggaaaaatttccccgtcagctgttctggtgatcaataaaaacggaacgaagttggtaaatgtaaagaatcaggatgcaatcaccaagatcctcgacatggttccggatctggcagataaatttacaggaaaagacaaggacgatgcgaataccgccgacgatatcgagcatatactgaatcaagaggagaaaaagcagggtgagtaatcacgagagtcctggggtttgtacttttttggatcggtgtgggtatgctgatccagctgctgattcccacctgtgtgtggacggtattgattgcagcagccctgatgatcatcggatataatttattttgcagttgttaagagggtgtcccgctgcgcaagatggcggggcactttttatgccaaagaacaggagaataacatttatgagtatattaaacgtagaacacctgtcccacggattcggtgacagagccatttttcaggatgtatcttttcggttattaaagggggaacacatcggactggtaggggccaatggagaaggaaaatccacattttttaagatcgtcactgaccggatgatgccggacgaagggaagatcgagtgggcgaaaaatgtgcgtgtgggttatctggatcagcacgcggaactgaaaaagggaatgaccatccgggaggtgctgtcttctgcattttcctggctgtatgaaatggaagaaaagatgaataccatctgtgatcagatgggagaggcttccccggaagagatggaacagatgatggaagagctgggaacgattcaggatcttctgacaatgcatgatttttacattatcgatgcaaaagtagaagaagtggcccgggcgctgggacttctggaactggggttggaaagtgatgtaacggaactgtccggcggacagcgtaccaagatccttctcggaaaattgttgctggaaaaaccggatatcctgcttttggacgagccgacaaactatctggatgtgcagcatatcgaatggttgaaacgatatctgaatgagtatgagaatgcatttatcctgatttcccatgatattccatttttaaacagtgtggttaatatcatatatcatatggaaagccagaagctggatcgttatgtgggagattatcatcactttgaagaagtatatgctgtgaaaaaggctcagctggaggcagcttataagagacagcagcaggaaatcagtgaactgaaagactttgtggcaagaaataaagccagagtttccacacgaaacatggcgatgtcccgtcagaaaaagctggataagatggaaaagatcgaactgatgcaggaacgtccgaaaccacagtttctgtttaaagaagcaagaactgccggaaaacagctgttttgtacgaaagacctggtgatcggatacgacgaaccgttatcttctccactgaatctggagatggagcggggagaaaaggtagtactgaccggagctaacggtatcggtaagacgaccctgttaaaaagcattctgggaatgatcaaaccgttggatgggtttgcccagctgggagattacctgtatattggctattttgagcaggaatcttcccaggacaacacgaaaacctgtatcgaagagatctgggaagaattcccttcttacacccagtacgaagttcgttcagccctggcaaaatgtggcctgaccaccaaacatatcgagagccaggtacgtgtcttaagtggaggagaacaggcgaaagtgcggttgtgtaaacttattaaccgggagacgaacctgttggttctcgacgagccgaccaatcatctggatgcggacgcaaaggcagaattaaaacgtgcgctgaaagactacaaaggaagtatcctgatggtctgccacgaaccagaattctatgaaggactggctaccggtgtatgggactgttctgcatggtccacaaaacggggataggatattatacaaactgaatacataataaaaatttctctgaaaaattggtcgacaggatcaagagacaacagggaatacagtaaaaaagaagcggtatgcaatggtaggaatttgcatatcgcttcttttcagccacgctctagcagacttcggtgacgtgacggatcagcatatcctgtattgcagggtattcgccgagtcctttcatacgacattccacatcgtatcctgctgcccggaactgatttttccaggaatcctcgtcatcgccggacatatcgtttcgtgcatgatcgcccgctacgatcatgaaaggtgcgaggatcactttttttgcttcctgttcttttaccatacgggttacattttccagtgtcggatagccttctacggtagccagatgaatattggaaaatccaagatctttaaaacgataatcaagtgctgcgtagacatcattggcatagtggctggttccatgtcccataaggatcagtgcacagtctgccgggagattggagaactcctggcagatggcattgacgatctccacatgatcctgctgcgtggtaagaagcggatcaccaaaagtgatgcgttcaaaacgatttttgaacgcaagagcatcttctttcatcagatcattttcaataccattgatcacatgggtaggctgtacgatcacttctgtgatgccgtctgcgatcatctgttccatggcttcggttacgttgttgatccggatattgtcccgttccagaagttttgccatgatcattttactggtccaggcacggtaaatcttataatcagagaaatgttctccgatgcgctgttcaatcacatcgatggtctttttgcaggtatccggaaaactggtaccgaaactgaccaccagaatcgcttttcttgttttagacataaggttttgttcctttcatcaatagtgataatttcctctgtatgtagtgtacctttattaatcactttttgtcaattgtctgtagaaaaaaccgtgtaactattttctaaaagcgaaagatgtggtatgataactcgtaatgcattttgccctgtaactgtgagaaaactgaacagttgcgataaaatgctgtcagggaggaacaaaaaatgagtatatcgatgatcggaatcgattataataaagcgaatgtagatatccgtgccatgttttcatttacaaagaaaaatgcgacagcggccatggaacggctgaagaaaataccggggatccagggatgcgtgattctgtccacctgtaaccggatggagctttgggcaagcacgaaagcagactgggacggaacgctgttagaagaactctgtaagattaaagaagtggatccaacccagtacggggaatattttgtgcagcgaaacgaggaagaagccgtggaccatctgtttcatctgaccagtgggttaaaatccatgattctggcggaagatcagatcatcacacaggtcaaggatgcgctgacgctggcaagagaggcctttgtgacggataatgtactggaagtactgtttcgaaaagcggtgactgccggaaagaaagtaaagacaaatgttattttctccagagcaaatcagaccgcgatggatcaggcgattgagatgctaaaagaacggaaattcccacttccggatgccagatgtatggttatcggaaacggagagatgggaaaactggcggcgcagtctctgaaacggaccggtgcggatgtgacggttaccgtccggcagtaccgaagcggtgtggtgacgatcccaatgggatgttccagaatcaattacggagaacgtctggattttcttccggggtgtgatctggtggtcagcgccacggcgagtccgaattatacactgacaaaagaacaggtagaacagctgtcactgaaaaaacagattgtttttattgatcttgccgttccacgggacatggaaccgggactcagtgagatcgaaggcgtggaactgtataccatcgatgatttcaaactgagtggaccgagtgcggcaacgatgcagtcgatggaacaggcagaagccatcattcaggaagaaatcgatgatttttatgtctggtatcagggacgggcgctgattccgcggattcaggagatcaaagaggacgcggtgacggatctgaatctccggttacataagattcttggcaaacttccgctgagcgaacaggagcggaaagacctggaagcatctatcgatacggcagcgggaaaagtagtgacgaagatgatcttcgggctgagggataccctggagacggatgcgtttatagattgtgtggaaggactggaaaaagtatatgaagaatagcgctttttttcctttatttgtggatatcagtgagaaaaagatcgtggtgatcggcgggggagctattgccacaagacgggtaaagaccttactttcgtttgaaccacagatcgtcgtggtagcaccggaagtgaccggagaactggaagagttggaaaaagaagaaaaaattacgattttccacagaaaatatcagagagaagatatttatgatgcctggatggtgttggctgctaccaatgatcctgaattaaataatggaatctacagtgtggcaaagtgtctgggggctcttgtgaatgtggcaagcaatcaggaaaaatgtgattttcattttccgggagtgatccggaaagatccctatgtgatcggcatcaatggatcgggaaaagaccataaagggactgctgaattgcgaaaacagatcgaggcagtggtaaatcatacaatctgcatagggagccgggagagccgtctggcggtgatccagagtgagatggtgatggaatatctgaaaaaagaatgtccgcaaaaagagatccgtctgcttacgatgaaaacaaccggcgataagattctggaccggacgctggataaagtaggcggaaaaggactgtttgtaaaagaactggataaagcactgctggagagaagaagtgatttgtctgtacacagtctgaaagatatgcccatggaagttccggaagaactgccgatcgtggcattttcaaaaagggaagatcccagagatgtgctggtgcttccggaaggtgcagacaacctggatctgtcgaaacctatcggatgttccagtcagaggcgaatcctgcagctgcagcagatgtacccggaagcgacctttaaaagtattcgcggaaatgtgctgaccagattgaacaaactagatggaggagagtacagcgggctgatcctggcagcagcaggattaaaacgactgggactggaagaacggatttccagatattatgagccggatgaagtgattccggcagcaggacaggggattcttgcagttcagggacgacagggagaagattattcgtatatggagcgttttgcagacagagagggaacgattgcagcactttgtgagcgtgcctttgtccgatatctggatggcggatgttcctctccggtagcagcccatgcggtaatcgaaggtgatgagattttcctgcgagggctgtattatcaggaaagtaccggaaagcataagataggaacgatgcgaggctctgtgaaagatccggagaccctgggtgtgaatctggcaaaaaaactggtctgggaggttggaaaaaatgagtagacagggaaaagtctggctggtaggtgcaggtccgggtgatgtgggactttttaccatcaaaggaaaagacatccttgcaaaagcggaagttgtggtatatgacagtctggtaggtgacggtgtgctgacaatggtaccggaggatgcggagaagatcaacgtgggcaaacgtgccgggcatcatacgatgaagcaggaaaatattaataaagttcttctggaaaaagcacaggaggggaaaagggtggtacggctgaagggtggcgatccgtttctcttcggacgtggtggagaagaactggaacttctgtgtgaacataaaattccatatgaggttgtacctggtgtaacttcctgtatcgcggttccggcctataacggaattccggtcacacacagagatttctgttcctctgttcatgtgatcaccggtcacaaacgggcaggagaaagatataacattgattttgaagccctggtcaggacaaaaggaacgctggtattcctgatgggaatcacggcgatggaagatatctgtaaagggcttcttgaagccggtatggatccggagacacctgcggctgttttacaacagggaactaccgcggggcagaaaagagtagtggctacggtggatacattaaaacaggcctccgatgcggcggagatccagacaccggcaattattgtggtcggacaggtttgtcaggtggcagatacttttggctggtatgaaaaactgccgcttgccggttataaagttctggtaacccgtccgaaagaactggtttccggcatggcaaagaaactgcgggaacagggagccgaggtgctggaacttccggcgatcggtgtgaaaccggtggaagacagaacaaatctttcccgggtatttgaaaaacttgacacctatcagtggattgcatttaccagtccgagcggtgtaagaatcttctttgaactgctgatggaagccggaaaagatatccgcgcactgggacagataaaaattgccgccatcggaagaggaacagaaaaagcattaaagaaacataatctgtatcctgatctgatgccggaagtttttgatggggcatctcttggagcaaaaatggcaaaagaatgtgagccgggagcaaagattttactggcaagagcggcaatcggcaataaagaagtgatcgaagaactggaaaaaagagaagaccttatagtagatgatgtggcaatttatgatacattctatgagaatcaggatctgatcgatgaaaaaggacagtttgagagagggaagatcgactgtgccgtatttaccagtgcatcaacggtaaaaggctttatagctgccacagagggactggattatacgaaagttcttgcagcctgtatcggaaaacagacgcaggaggaagcgttacgatacggaatgaaaactgcagtcgcaaaagaagcatctattgacagtctggtggaactggtaataaaattaaaagggcagagagaaaaaaaccaagctaagatagaaagtgacagaagaaaagaggaagaacagtcatggatatgataaagagaccgagaagactccgcggaggagagacaatcagaaagatggtacgggagacccggatggacaagtcttccctgatttatccgatgtttgtacaggaaggcaccggaagagaagatgagattccgtccatgccgggacagttccgctacacgctggatcgtctgccatatgaactggaacgcctggcgaaagcaggtgtgggaagtgtgatgctttttggtatcccggatcacaaagatgagattgccagtcaggcgtatgcccaggatggcatcgtacagcgggcgctgcaggtgggaaaagaaaaattcccggagctgtattatattaccgatgtgtgtttgtgtgaatataccagtcatgggcactgtggcatgctttgcgggcatgaagtggaaaacgacagcactctggatctgctggccaagacagctctttcccatgtacaggcaggtgcggacatggtggcaccttctgatatgatggatggccgtgttctggcgatccgcaggatgttagataaaaacggtcacaaagagatcccgatcatgtcctatgcagtaaaatacgcatctgcgttctacggaccgttccgtgaagcggcagattctgctccggcattcggagacagaaaaagttaccagatggatccgcacaacagccgggaaggtgtgaaagaagctcttcttgatgtggatgaaggagccgatatcatcatggtaaagccggcactttcctatctggatatgatcacaaaagtaaaagaagtgaccaacgttccggtagcagcctacagtgtcagcggagaatacgcgatggtgaaagcagcggcacagaaaggctggatcggtgaagagagaatcatgtgcgagatggcagtgagtacctatcgtgccggcgcacagatttatctgacgtattatgcaaaagaactggcaaaatgtatggacgaagggagaatcggataatgagcaggtcagatgaattatttgaaagagcagtgaaggttatcccgggaggtgtcaacagcccggtacgtgcctacggttctgtagggatgactccaagatttatcgagggcgcatcaggcccatatgtagtggatgcagacagcaaaaaatatattgattatatcagctcctggggaccgatgattctcggacacaacaatcaggaagttctgaacgccgtgatccggaaagcagagagcggtctgagtttcggtgcggctaccgagatcgaggtggagatggcggaatttatctgtgaaaatattccgtccatcgagatgatccgaatggtcaattccggaacagaagccgtgatgagtgcgatccgtgccgccagaggctatacaggaagaaacaaaatcgtcaaattcgccggatgctatcacggacattccgatgctctgctagtaaaagcaggatccggtgtgatgacggcaggaatcccggacagtgccggcgtaccggcgggagcaacccaggataccctgacggctgtatacaacaacctcgagagcgttaagaggctgtttgaagaaaacgaaggacagatcgcagccgtgatcgtggaaccggtcgcagctaatatgggtgtggtacttccaaaggaaggcttcttaaaaggtcttcgtgaactatgtacaaatcatggtgcagttctgatctttgatgaggtaattacaggtttccgtctggcattcggtggtgcgcaggagcggttcggaatcgaggcggatctggtgacttacggaaaaatcatcggtgccggtatgccggtaggtgcttttggcggaaaacgggagatcatggaagtgatcgcaccggtaggccatgtatatcaggcaggaactctgagcggtaatccggtagctatggccgcaggtctgacacagctgaaaatcctgaaaaatcatccggaaatctatactcatatgagccagatgggagaaaagctgtatgaaggtatgaaagaactggtgaaaaaatacggaaaaccatggaaagtcaaccatatcggatctctgggatgtatctatttcaccgatcaggatgtggaaaattatgaagacgcaaaaacttctgacacagaggagtttgcacgttacttccactatatgctggaacatggtatccatctgggaccgtcccagttcgaggcaatgttcttatccaatgcccataccgaagagacaaccaaagagacactggaaatctttgagggattcctgaaacaagagtaagtagaggaaaccgttcaaggcctgcaactgcgaaggcataaaacggttcatcaaagaggatatcaaataaatgaaaagtgaatggatgataaccctgctcacggcagggggcatcctgatcctgtgcgctgccatgatcatctgggataagatccggcagcgcaaatggtttctgcggcatctgaaacagcggtggggaaccgtaccggatcgggaatatacccaggaggaactggaaagcatctcccattatgcgaaacggaatgagggagagcagtttatgatcgatgatatcacctggaacgatctgcagatggacgaaatttttatacgtatcaacaatacactttcttcctgcggcgaagatgtactttaccagatattgcgccagccgcagatggatcgaaacgtgttggatgaaagagaacggctgattgcatattttcagacccatgaagaagaacggattcaggtgttgacacgggtaaatgaggtcaaaaagatctggaaaatgtctattgcggattatatcgatgcattgaaagacgtggatcgcagaggaagaggaaaataccctctgcttgcaggactttcggcagcggcaattgtcgctacgctgatccgcccgatcccgtgtatgtttctgttgcttctgatgctctgcgtcagtgcggtggttcatacacgggattccaaaaggattgaaccgtatctgaactgctttgtctgtatccttcgtcttctgcgggcagcggatcagtttgaaaaactggacaatccggtgattcagacctatcttgaccggatccgggcaggcagaaagaaaacgaaaagtttccgccggggtgcttttctggtggcttcgacgaattctgtacaggacggtctggaagcaatcattgtctcctatcttcgcattatctttcaggtggattttatcaagttttattcgatgctgaaacatgtagaagggaatgaatctaccatcgaagatatgtatcaggcgatgggagagttagatgctttgattgcggttgcttcgttccgggagagtctgccttattacagccaacctgaattcgcggaagtgaatgaccgggagggtgcatctttgaaagtggagaaactgtatcatccgctgatcggcgatccggttgcaaacagcatacagatgcagaagggagtgctgatcaccggatccaatgcttccggaaaatctacatttttaaaaaccattgcgatcaataccattctggctcagaccgtacacacctgtattgcaaaggattactgtggaagttttatgaaggttcttacttctatggcattgcgagacaatctggcaggtggcgagagctactatatggtagagatccgttctctaaaacgaattctggaagagtgtgagaaaccagaaccggtgctttgtatcgtggatgaggttcttcgcggaaccaacaccatcgagcgaatcgccgcatcctcacagatcctgcattctctggcaaaaccgaaagttcttgccatggcggcaacgcacgatatcgaactgtcctatgtcctggaaaaagagtatgataactatcactttgaggaagagattcaggaaaatgatgtggtatttgactataaactccgcaccggcagaaccatgacgagaaatgcgatccgcctgcttgctatgatcggttatgatccgaagattatcgaggcggcacaggagagcgcgaaacactttgaagaaaccggtgtgtggaaataaaaggagaactgttatgttagtgaaaatctataccgacggcgcagccagaggtaacccggacggaccgggaggatatggctgtgtcctgcattataccgatcgaaatggaaatcttcacgagaaagaactttccgcaggatataaaaagacgacaaataaccggatggagctgatggcagcgatcgtgggtctggaagccctgaaccgtccctgccagatccagttatattccgattccaagtatctggtagatgccttcaaccagcattggatcgatggctggatcaaaaaaggatggaagcgtggaaagaatgagccggtaaaaaatgtggatctgtggaaacgtctgttacaggcgaaagaaccacaccaggtggaatttatctgggtgaaaggccatgacggccatgagatgaacgagcggtgcgattatctggcaacctccgcggcggatggagacaatctgttggtggacccggggattgcataaagaaaaagaacatgtattttaattatattaatagttaaaatacatgttcttttttgtatataaaacgctctaacagtatcaaccgggaagatctccacgaatccggcagcggtaatcacttggtgtgattcccatgatacggtgaaagatttctgtataatagctggcaccggaaaacccaacctgtaaagcgatctctgtgatggtatacgaggtattgacaagcaaaggaatactctgttcgatacggtaagtcatcagataattcatcggtgtctggtggagaagacgtttgcagagtctttcacactccccgggacttacagagaccgcatctgcaagatctttcaaagatattttaccggtataatgagagtgaatataagtaagaaacgtatccagtgtttttctgtctctggatatttttttggcgggagcgatcgtaaaaccaggtcgctgactcattttccagagaagtccccaggtggtggaaagatgggagagaatctgcagttcccaggtttccggttgttcctggtgaagaatcccacacttgtagagaatatgcagaagtatctgctgttcaggatcttccggacgtatataaagtgcaggagttgccggattaccgagcagaggttttacgtattttcggaaaagaacattagactcggtaccatagataaaagcagggtggaagataatggtatgcgatactgcggtttcatttcccacaggatgacaatcgtgcagctgtttggcattgatccagagcacttctccggggtggagcacatattcagttaattcaacctgaatccgtacagatccctgaagctgatagtggaattccacttccggatgccagtgcatgggaacatacagggtatgttccccgctttccgacactggaaaataatccatgtggatatcaaccggaaaatcatggctgccatgaagctgattttctttcagatttttctgggtggaaatgacaggacagtttgttgacataagcggtacctcggattatgttgattttgttatagaaattgcagatattgtgatagctgaattcctgtgaaattattatactttcttttgtgttaaaacacaagaaaggaagttcagaatgattttgttataaaaaacagatgaaaatctgattttcaggagagaggaagagaaggaggatcttttattatgggaacaaaaaagaataatctgggggttcgtatcgcgatggcggtaatcggaatagcactgactgctgtttctgtggggcttcaaaagatttcgggacttggagtggatccgtttagtgttattattttcgggttttccaatgcctttcatgcgacatatcagaccgtatacattgtggtgtgtgccgttttgctgatcatagcatttgtttttaacagaaaattacttggaattgcaacagttgtcaatctgtttttcagtggatttgtcacagatgccaccagaaaagcagttgtaaaaatggtgggggaacatccctcgatggcagttcgtgttatcttattgctgatcgttgtactgttgatttctatttcttcagctttgtactattcttcagaacttggggtatctccatacgatgcacaggcactgacaattgcagagaaaacaaaatttcccttccgcgcagtgagaatcggtaccgatgtggtgtgctgtgctgtcgggtttgctctgggaggagacctgggactggctactctggtgtatgctttttgcatgggaccatttatccagttttgcagggaacatttaacggataagatggcagcaggagaactgtttcacaaataaagaatgagaataagggaaaatccgctggtgtccagcggattttctgtgagcacggagtatatttgaaatcatattttgaaaaacggtgtgagagcagacagcacagcatccggtgtattttttcgtgagtttttccaacaatcacggaataatgattgacagtatgcacgcagaatgatatactcattctgttaaaaagataacggtaaaaattaccgaatatcgaccacatagaaaagcgtaaggtgtcggatgacagaagatttctgttaatccggtgaaaagggaaacaggtgtgaatcctgtacgaactcgtcaccgtgattcgcgagggaagacaaaaaccactgggaaaccgggaaggtgtcaaaccgcttgagcgatcagccgggagacctgcctttgcgcagtacgggaacgaaagttcaggccacgaggaattggcagtacgaaagaaaaacctgtttgcttgtataaaaatggtttttccggcacttatggtgaaagaagcatctataaccgttaaacggttctggtatccctgaaactgattctgaaactataagaagaattccaaatgtagtacctactaccttcgtctccggacggaggttttttatgtttcatgcgggcaagaccccagataaccttcttcggagagccgtcctgtaccaccgtggtacacaatctcaaaaggacaaagacaggaggaaccatgagatgaaaaagaaaattgtagtgctgatgctttcagcagctatgaccatgtccatgatgacaggatgtggaaacacagcaaaggatgacagtgcatccacaacaacagaaacaacacaggatgcagaagccacagaagaagcagaaccgacagaagaagccaccgaagaagcaacagacgacagtgcatctgaccaggaggcagcagataaagtagcagccctgatcgatcagatctatgtgcaggaaagaaacgacaacactgacgaacagtgtaaagaagccaaagaagcctgggatgctctgaccgacgcacagaaagaactggtagaaggtgaaaatgcagaccctgattacttcggaagagataccggtgatgcatccaaggacgatccgttaaacggagatgacatcggtgacaacgaactgctggtagtaagtttcggtacttccttcaacggcagccgtgcagcagatatcggaggtatcgagaaagccctgcagaccgcatatccggactggtccgtaagacgagcctttaccgcacagatcatcatcaaccatgtacaggcccgtgatgacgagaagatcgacaatatggatcaggctctgcagcgtgccgtagacaatggcgtaaagaacctggtggtacagccgactcatctgatgcatggcgctgagtatgacgagctgacagaagcagtagaaagctacaaagataaatttgaatccgtaaccatcgcagaaccactgttaggagaagttggggacagtgacgatgcagtcaatgatgacaaaaaagcagtagcagaagccatcacagcagaggcagtaaaaactgcaggatatgatgatctggatgcggcagaggcagacggaaccgcattcgtattcatgggacacggaacttctcacactgcaaagatcagctacagccagatgcagagccagatgaacgatctgggatacaagaatgtatttatcggaactgtagaaggcgagccggaagataccgcatgtgaagcagtgatcgaaaagatcaaagaagcgggatacaaaaaagtagtgcttcgtccgctgatggtagtagccggagaccatgcaaacaacgatatggccggagatgatgaggattcctggaagagccagtttgaggcatcaggagcatttgacaagattgatactcagatcgcaggactgggagagatctcttctatccaggatctgtatgtagcacatagtaaagctgcaattgatggaaagagcgcttctacagcaaactaaaacatatcagatacgtaactgctcagcacccactgtgaaggtactgaaaagttatgacagatgaataaaaggaacagcctgtccgatcagctgctattcagtgactggtcagactggctgttttttgccaaaatccagagatatacaagtcaaaatgccatcaccgaaggtgattagaaatgcatactgcatcgtaactgtgaggttactgaacagttacgatgcaacattgacaagtaattggagcggtgctagaataaacaggaaatatagcataactgaataaaatgtgtaaggtgccggacgaaaaaatgtccggtgaaaagggaaaccggtgagaatccggtacgaactcgtcaccgtaattcgcgagttgaggctaataaccactggaaaaccgggaagggagccaaagtgtcagagcgatcagtcgggagacctgccttttgcagtacgggaataagaacagttactgtgctcggtaactgagaattcaggccacgagggactggcagtacaaaattaagaaagtcagaatcatactggctgattcttgtgtaacctgtgcctccgccaattggcggaggtttttcttgtattggacattaataattggtccggtggatcaattatgattttcttttttattcatttatgtactcatatctgagaacaggaggatttaacatgaaaaagaaactggtagtattgatgttatcagcagccatgacagcaacacttctgactggctgtggcgacaccaaagaaacaacatccgaatccacaacaaccgaaacagaggcagaagccaccgaagaagccgcagatgacagtgcatctgaccaggaggcagcagataaagtagcagccctgatcgatcagatctatgtgcaggaaagaaacgacaacactgacgaacagtgtaaagaagccaaagaagcttgggatgctctgaccgatgcacagaaagaactggtagaaggtgaaaatgcagaccctgattacttcggaagagataccggtgacgcatccaaggacgatccgttaaacggagatgacatcggtgacaacgaactgctggtagtaagtttcggtacttctttcaatgacagccgtacagcagatatcggaggtatcgagaaagccctgcagaccgcatatccggactggtccgtaagacgagcctttaccgcacagatcatcatcaaccatgtacaggcccgtgatgacgagaagatcgacaatatggatcaggccctgcagcgtgccgtagacaatggtgtaaagaacctggtggtacagccgacccatctgatgcatggtgctgagtatgacgaactgacagaagcagtagaaagctacaaagataaatttgaatccgtaaccatcgcagaaccactgttaggagaagtcggggacagtgacgatgcagtcaatgatgataaaaaagcagtagcagaagccatcacggcagaagcagtgaaaacagccggatacgacagtctggaagttgcggaagcagacggaaccgcatttgtattcatgggacacggaacttctcacactgcaaagatcagctacagccagatgcagagccagatgaatgatctgggatatgacaatgtatttatcggtaccgtagaaggaaaaccggaagatactgcatgtgaagcagtgatcgaaaagatcaaagaagcgggatacaaaaaagtagtgcttcgtccgctgatggtagtagccggagaccatgcaaataacgatatggccggagatgatgaggattcctggaagagccagttcgaggcatcaggagcatttgataagattgatacccagatcgcaggactgggagagatctctgctatccaggatctgtatgtagcacataccaaagctgcaatgaatggaaatgatgcagctatttccgaagagtcagaggaaacagccggcacactggaagatggtacttatgaagcagaatttgacacagacagtggaatgttccatgttaacgaagcaaatgacggaaaaggtatcctgacagtaaaagacggaaaaatgacgatccatatcagcctggtatctaagaatatcgtaaacctgtatgtgggaaaagcagcagatgcacagaaagacggtgcagaacttctgcagccaacaaccgatacgatcacctatgatgacggaagtacagaagaagtatatggctttgatgttccggtaaaagcactggatgaaacctttgatctggcactggtcggaacaaaaggaaaatggtatgaccacgaagtaagcgtaagtgacccggtgaaggcagagtaaggaaatagttaccgaaaacggagcggacagtaactttgacggcaaatcagcctcttgacaaaaaaagtagaagtttgtatactacatccatatgattgattcataagaaaatgcattgataagaaccagtagcagcaagcatccgcacagagaggagccggttggtgagaggcccgcggggaactttctgtgaatacatctttgagctttgcaccgaacgcatcgtgctggtaggctgcaacggaaggacctccgttatacgggtcagagtatagatttacctgtacttacagaggcaggaggtgcgaaccttctgtgaaattaggtggtatcacggaacctggcttccgtcctataaaaaaggacgaggccaggttttcttattttacaggaaattgctttcccgtaaagtaaaaaaatgttccgcgggaatgtgccaagacacattctttgttctaaataaacacaaaaggagaaagtttatcatgacaatttatgacgaattagttgcccgtggtctgatcgcccaggtaaccgacgaagaagaaattaaagatttgatcaataatggaaaagcgactttttacatcgggtttgacccgactgcagacagtctgcatgtaggacattttatggcactgtgcctgatgaaacgtctgcagatggcaggaaacaaaccgattgcactgatcggtggaggtactgccatggttggtgatccgtccggaagaagtgatatgcgtcagatgatgacacaggaaactattcagcacaactgtgactgctttaaaaaacagatggagcgttttattgatttctctgacggaaaagcactgatggtaaataatggagactggctgttaggattaaactatgtagatttcctgcgcgagatcggaccgcatttctctgtaaaccgtatgcttaccgcagaatgctacaaacagcgtatggaaaaaggattaagcttcctggagttcaactacatgctgatgcagagctatgacttctacatgctgtaccagaaatacggctgtaacctgcagtttggcggagacgaccagtggagtaacatgctgggtggcaccgaactgatccgccgtaaattaggaaagaacgcatgtgccatgaccatcaccctgctgttaaactctgaaggaaagaaaatgggtaaaacacagtccggtgcggtatggctggatccaaacaaaacttctccgtttgatttttatcagtactggagaaatgtggcagatgccgatgtcctcaaatgtatccgtatgctcaccttcctgccgttagagcagattgacgaaatggataaatgggaaggaagccagttaaaccaggcaaaagagatcctggcttacgaactgactgccctggtacatggtgaggaagaagcaaagaaagcacaggaaggcgcaagagcactgttctctgcgggtaatgcagcaaacatgccgtccactacactggcagccgaggatttccaggatggagccattgatctgatctctctgctgtgtaaagccggtctggtaacttcccgttctgaaggacgtcgtgccatcgagcagggcggtgtatctgtagacggagaaaaaattacagacattcgctacaacgtgaaaaaagaagacatcacagaagagggtattgttgtaaaacgtggtaagaaaaaattcatgaaaatctgcttataagaagggtgtcacttgcacgggcatcacaattgtgctaaagtagaaagatagagaaaaattgtggaagctccggaatgtttctgggaaaactccggaatcgtggagcttctgacagcaataaatatgaggaggaacatacagtgaaaaagtatggagtaaacgaacttcgtcagatgtttctggactttttcgagagcaaaggtcatttggtaatgaacagcttttccctcgtaccccagaatgataacagccttctgctgatcaatgcaggtatggcaccattaaaaccgtattttaccggagcagagattccgccgagaacccgtgtggctacctgccagaaatgtatccgtaccggtgatatcgagaacgtaggaaagacagcccgtcacggtactttcttcgagatgcttggtaacttctcttttggtgattacttcaaacacgaagccatcgcatggtcctgggaatttctgaccaaagtggtaggtctggatgagaaccgtctgtatccgtctgtatacgaagaggatgatgaagccttcgatatctggaataaagaaattggtgttccggctgacagaatcttccgtttcggaaaagaagacaacttctgggagcacggcgcaggtccttgcggtccgtgttccgagatctactatgaccgtggagaaaaatacggctgtggcaaaccgggttgtaccgtaggatgtgactgcgaccgttatatggaagtatggaataacgtatttacccagttcgaaaatgacggggaaggtcattatgagactctgaaacagaaaaatatcgataccggtatgggactggaacgtctggctgttgttgttcaggatgtagattctatttttgatgtagatacactgtgtgccctgagaaataaggtctgtgaagttgccggaaaaacttatggtgtcaatcacgaggacgatgtatccatccgtctgatcacggatcatatgcgttccgctaccttcctgatctctgatggggttatgccgaccaatgaaggaagaggctatgttcttcgccgtctgatccgtcgtgcagcccgtcacggacgtcttcttggtatcgaaggaccgttcctggagaaactgagtgagactgtcatcgaaggatccaaagacggatatccggaactggaagaaaagaaaacctttatcctgaacgttttgcataacgaagagagtcagttcaacaagaccattgatcagggtctgaagattctcgccgatctggaggcagagatgaaagaagcaggaaagtccgtccttggaggttctgatgccttccgtctgtatgatacgtatggattcccgatcgatctgacgaaagagattctggaagaaaaaggatacactattgatgaagacggcttcaaagaagagatggaagtacagagaaaacgtgcaagagaaagccgtgcagtcagcaactatatgggcgcagatgcaactgtatacgatgagatcgaccgcaatatcacaaccgaatttgacggatatgacaaactggaagctacctccaaagtaaccgttctgaccacagagacagagatcgtggattccctgatggaaggtcagaaaggaaccatctttgtagaaaagacaccgttctacgctaccatgggtggacaggaaggtgacaccggtgtgatcaccactgcaaacggtgtattccgtgtagaagataccatcaaacttcgtggcggcaaatacggccatgtaggtgtgatggaatccggtatgatctccaacggagatgaagtaacactgaaagtagacgagcaggaaagaaaagacacctgtaagaaccacagtgcaacccatctgctgcagaaagccctgaagactgttcttggcgctcatgtagaacagaaaggttctctggtgaatccgaccagactgcgtttcgatttcgcacacttccaggcaatgactccggaagagattgcagaaacagaggctctggtaaataaagagatccaggctgcactgccggtaaccacacagatcatgggtatcgaagaagctaagaaaacaggtgctatggcactgttcggtgagaaatacggcgatgaggtacgtgtggtatccatgggcgatttctctgtagaactctgtggtggtactcatgtggcaaatacagcgaatattacattgttcaagatcgtatccgaagcaggtgttgcggcaggtgttcgtcgtatcgaagcattgacaggtaacaacgtgatcgaatactatcgtcagatggaagaaaatctgcatacaatcgcaaaaacactgaagaccagtcctgctgagatcacagaaaagatcacacatctgcagaaagaagtaaaagaactgcagagtgaaaatgaatctctgaagagtaagatggttcaggattctctgggaaatgttatggatcaggttgtggaagtaaaaggtgtgaaagttctggcatctgccgttgatggtgtagatatgaatggactgcgtgacctgggcgatcagctgaaagaaaaactgggtgaaggtgtggtagttctggcatctgccaaagatggcaaagtaagccttcttgccatggcaacacagggtgctatggataaaggagcacatgcaggtaatctgatcaaggcagcggctgcaatcgtcggaggaggcggtggtggacgtccgaatatggcacaggccggcggcaagaacccggataagattccggaagctatcgcaaaagtagcagaactggtagagggacagctgaaataaatccagtccggaaaaaacaacaaaaaaaccggaaaaatttcaaaaaaccagttgacgaaataaaaaaatctgttataataattaccagtgcaataaaatacccaaacagttgtattatgcacaatctacaactggagggaggttaggtgtgagactatgtcaaacgttatcgtaaaagaaaacgaaactttagatagtgctctgcgtagatttaaacgtagctgtgcaaaagcaggcattcagcaggaaatccgcaaaagagagcattacgagaaaccaagtgttcgtcgtaagaaaaaatctgaagctgcaagaaaacgtaaatataattaatatgtgcacattggcgtaagccatgagaagagggatactgcgagcaggatccctcttttacgtatatatttttcaaatcttataatttctttaagatttgaaatctgtatagtcttttgcaaaggcatatgatataattttcgcagaatagaaatctgcttataagtgcagaaaaagaaatgaggggaaatttctatgtggacacatgcagtgtatggcacggatctgtatcattttatccaatggtttatcctgtatagtttcatggggtgggtagtggaatccatctatatgtcattttgtaacaggaaactgactaaccgcggatttgcgttttcacccttttgtccgatctatgcagtaggagctttgtcagtgtatggcatgcttcgtccgctggaaggccaatatgtggtgctttatctggcgggcgcggttcttgctacgatgcttgaatatattacggcagtgcttatgcgaaatctgtttggacaggtctggtgggattatacggagaaaccttttaattataaaggtgtgatctgtctggagagtactatagcgtggggattctatacaatctttatgtttggcttcctgcagagatttgtaaacttcgtatccgacagctattctgttcgatttggcagaaacctggcggcagtcgtggttgtgatctatacatttgatttttcgttgcatctgttcaaagcgaaaatgaacagaatgccgagaaaagtggaagagatgaaagaacgtgtcggttttcatattggaaaaatgaggtaactattccgcaggtaactgtgagggtactgaacagtcacagaatgagtaaaaaacgggtgctaacccagggtgtgataatcctgagtcagcacctttttatattgttcctgtaaagtttccagagtgaaaggttctgtgctttcggcatgaacaccatgggaggcagcgagcttgtcggtgtaatcggaaagcttgtaaacggtatagatattctgatcatgattataatgagtaaccagagggaccagatcagcattacggatggaaagagcatcggagaccggatcccgaacaatggtaatatctgccatgccgccaaggagacagacagggtctttctgcgtggaaataaagtttccaagagaataatagaccaacatctgatgtccgctgtcatctgtcagtgtctcaaaattctgtagcgtatggctatgggcacagatggcaatatcgacaccctgatgtaacagcaactggagaaatgttttctcctcagtatctggttcagtggaatattctgctccggtgtgaagaaaggcgatggtcatatcactgatttcctttgcttttttgacatcggatattacttgatctgtgcggagaagatcaactgcataatccggaagttcatcgtaaggttcattgtttactgtagttgtgtagttgagaagggaaaaagtaacatccttacaactgatggtagtgatttcaccggcactttctgcggaatcatggataccgaggagagcaacttccgggtgactggtttcccagtatcggatagtatcggtaataccggtgattcccttgtcgaaaacatggttgtttgcctgttccacgatatcgaatccggcggtaacaagtgcatcaccgatttccacaggggctccgaaagcgggataagaagaaatgtttgcatgatcggatacaaagatactttcttcattgactgcggcgagatctgcggcagagatatcatcccggatgtgttcatacagatgatcataattccatacggtctgtgtggtatctgcagattcatagattccctgatgaatcagattatcgccgacggcgacaaaatgaatggtattattttccagtttctgctgtttttgcagctcagcttcctgcttttgttttatctgttttcggagctcggcctcctgggcggcggccctttgatgattgtgatagagtgtgacgaataaaccgattccggcagtcaggatcagacaggaacaggcaagaaatatcttttgacgccggacctgttgctggcgtttccgtttttgttccagtttgtgtgattcctgcatccggctggtattgttctgtgtgttaggtgtatccataaagttcctcgttgtttctcattctgtaataattatcgtaactattcagcaggtagcattccgcaaggtgttttggcatgtgttttaccaagatcccgagacatacaagtcaaccatcaccgaaggtgattagaaatgcatattgactcgtaactgctagagcgtgtttgaaaaatcattcccgcaatctgcacgccccagtttgcggcatattttgcccgaattcagttgccgtagcccgctacggcgccttcatccggacaaaatctcccacaaattgtgacgcacatcttgcagaaagcctttttcaaacacgctctagggtactgaacagttattgattttctttagctgacatataaatataactattatacaaaaaaagaaagaaagtagcaagaaaatctcaagcaaattgtataaaaaaagtaaagaacaggttactgttcatattcccgtgcaaaaagcagatgttccggcatatagtgaaacaaagatccgaaacgggcaaaggcgatgaagaaaagaattaccacatgggtattacttctgatgctgataacggttgaactctgtccggtgaaaatccagggtgctgtacagccggcgccggagatcagcgcaccgggagcggtacttatggaaccatctacaggaactgttttatacgaaaaaaacggagaagaacagcgaagtccggctagcattaccaaaatcatgactctgcttctgatttttgaagcactggaagacggacagatcacgctggaggaagaggcggtaaccagtgcctatgcaaaaagcatggggggatctcaggtttttctggaagagggagaaaaacagacagtggagaccctgatcaaatgtatcgtagttgcatcgggaaatgatgcatccgtggtaatggcagaacatcttgcgggaagtgaggaagaatttgtcaaaagaatgaatgaaaaagccggagagcttggcatgctacatacacagtttgaggactgctgcggacttacagattccgaggaacattataccacggcttctgatgttgcaattgtctcgagagaactgattacccgctttccccgtatccttgagtattcctctatctggatggaaaatattatccacagaacggcacagggagagaaagaattctgcctgaccaataccaataagctgattcgcagttatgaagggtgcgttggtctgaaaaccggaagtaccagtgtggcaaaatactgtgtatcagcagttgcacagagaggagagatgacgttgcttgcggtagtcatgggtgcgccggatgccaaggtgcgatttaaagatgcggcagccttgcttgattatggatttggaaagtgtaatctttatctggatgaaaacaggaaaaatccggatccggtacctataaaaggaggcgtgaaagcggaggtgtcatgccggtatacaggggaattccggtatctggatacagaagggaaaaatctttcacagatagaaaagaagattgtgtatatgaagaatctgcaagcaccggtaaaaaaaggagatatcgttggcgaagcacagtatttgctggatggaaaggtgattggcaaaacggatatagtggctgcgaaatctgtaaaaaaggcaggtctgtgggattatatcaaacatatcagaaagagaatgataaagggcgatgattattcggcagacaggtaactgtttgatacaaaaactgacgggaatgaaacagaaaactgttttcccgtcagttttgaaaatgtaacagtatcggttcctggtttacattacgatctgcgcagaacgtatcggaatcatcacatctcgaaaattactgcctgataacctggcatatgaaggatatctccgttaagatccagtgtgtccagattgttcatcagcacttttttgtaagttccaggaagaacaacgtcctgagcatcgtgctgataattggcaactaccagcagagttctgtctgtgccttttctgtaataagccatcagattggtctgttcttctttgtatgggacaaattcgccgtatacaaccacatctttgtattccggattcttgcggagggcgatcagctctttgtaccagtgatacatggaatccgggcgattcgcctgttcagcggcattgatatcggtataattcggattcactttcagccatggggttcctgtggtaaatcctgcattagcagttgcatcccactggaatggagtacgggcattgtcacggctataaggaacaacagctttgaaagcggattccggagtcagtccggcgtccagtgctacctgatactcgtcgagggtgctgcagtcatcaatttcatctatggagtggaaaacaacatttgtcataccaagttcctgtccctgatagatgaaaggcagtccgcggagcataacgttgacagcggcaagcattttcttactggtgtcgctgacgtctgattccgggatatagtggctgacaccgcgaggctcatcatgattttcgatgatattggagatgaatccgatatcccccaggcgtttctgggtaccgaaagcagcttttttgtattcctcaccccatacaactggtttgcatttgtaccatccgtcatcggatttgccggcgatggtttcggcaaaatcaaacatggaagagaagtggccattgtttccgataaatgcttccagagcatccgggcgatcggtaaatacttcacctacagtaaatgcttgatgtttttcgaatgtttctgttttcatctcatgcagaaagtcatcgataccttccgcatcatgaagcatgttatcgatgcttgccagcccgtcatcacggtctgcaggatagctggtataaatattcggctttttaatgttcatgattgcatcgatacggaagccggctacaccgcgatccagccaccagttgatcattttgtatatttcttcccggagtttgggattctcccagttcagatccggctgttttttgtgaaagacatgcatgtaatatttgtcggtgtgtcccggcagaagatcccatacaggaccgccgaaataagaacgccagttgtttggtaatttgtaatccttggcatctgcaatataaaaatatttaccgtattcgccgtccggatcttcgcaggcttttttaaaccattcgtgttcgtcggaacagtggttgacaaccagatccataacgatatacatattacgggattttgcttcttttaacagttcgtccatatcctccatggttccaaatcttggatcgatatcataataatcggagatatcatatccctgatctgccagtggagaacaatagatcggggagagccagataatatcgattcccagatctttaagataatccagtttgctgatcacacctttcagatcaccgataccgtcgccattggtatcgtaaaagctttttggataaatctgatatgcggctttttcgtgccaccattttttctctaacattgtagaatcctccttgtgtatggcctgtgaattatttagtgacattatagacaatgctgaggagaaaaaccaccgaaaaactgattaaaaagtatattattctgactttttggaaagatataattttcggtattacagaggagtgattccggttttgcgcttgaaaagtcgctgaaaattccccatattattgaatccacattccagacagatttctgttatctgtgcatcacctgtctctaacagccggatgaccttattcaaacggtaatcgttaatataatcgatgggagttttcccgatagaacgtttgaaaaagcggcagaaatactgctcgttcatatttacctgggaagccagatcctgtacatacagtttttcatggtaatgatccgtgatataagaaagcacggttttgatggctgtgatcttctgactttctgttctgggcgactggcacatcaaaccggcttccatgagaatcccgatgagctgaagtatccctgccttgatctgcagctgagagatgacatcatccgtaagaatctgttcgccggtgatcagagtttctttgctttgcgaaaaaatatgactgatctgttgataacagctgcggaaggcagaaaaaaaggggctggtctgatcgagaaaacggggaaatgtcagcttattctgcgtcagtggaagtaaaatggattcatcgatcgagtcataatcctggaaaaggagcatagatggtgagaaaacaactgcctgttcatcaaattccatactcagggaacgcagagaatgaagttctccgctgttaataaataaaaaacattcccggtcagttccgtaaggttccatattgatatccagtttgaaagaaccgtgatgaagataaacgatttcaacctcctcatgccagtgatggcggacacgaagacggtgactgggattgcaaaaatggtaataagcacagggaaacaggcgtgtaccgtgggactgcttttctttcagagacggttgctgagatgtctgattcatataaagttcctcctgctgataaaattatttggtaattatccggaagatagtattccactaaaaaccgaacagttgcgatacatctatcttatcatactaaacgggtcttttctatcataggatacataggaggggtaaaaatgaaaagaatctgggagcgggagatgtggatagtgctgggattccttgccggatgttttgctcttggaatggcaggcgggatcctgtttgccaatcttgcatatccgtgccgaaacggacaaaatcagatattagaattgtatgcactgacgcagattaaaaagaaagaaggaaaatcaacagaatatttctgttatcttctggaaaacagaatatttgcagttttgttttttatactgacgggacttacaggtgccgcacactttattgtggtggcagcggcagcctggatgggatttcttgcaggtgcggtgggaagccttttgattctggaacttggactggagggattcctgatttttgcaggttctttatttccacaggcttttgtatactttcctgcagttgcactgttgatgacaaaaatttacaaagaagggggaaatatctggaagaagccggtaaaagtaataagaatctattttctgaccggtctgatcgcaatgattctgtgtctttcaggtgttgtttttgaagcatatattcatccggtatggatgagatggattctgggacgattatgctgagaaaatattttacaagatatggtagacataagatttaagcgttcgatatgttgtagttttggatgaaaattgggaaatgtagagataaatctgaaaaataagggtttgcttttctgaaaaaacacagttataataaatttacatgcaaaaacaggtgaggtttttgctctatcattatacaatgaggacacgggaaaatatggaaacagagataaaaatatttatatcttatttacataatacaaaaagaatgtccggcaatacggtggtgtcctatgagagagatctgaggaaaatgatgcagtattttcaggaagcacatcagattacccgggtacaggatatcacggaaaccagtctgaattcttatatgttgtatctggaaaagaatcattttgcagcgtctacggtatcgagaagcgtagcttccatgcgtgcgtttttccagtatctgtatcaggagcatctcatagaaaataatccggcagatcatctgcatccgcccaaggtagaaaaaaagatgccacagattttgtctgtggaggaagtggatctgcttcttcgtcagccgtcggacaggacgccgaaaggattgcgggatcgggcaatgctggaactgttgtatgccaccggaatccgggtcagtgaactgatccatctggaaatgtcggatgtgaatctggcgatgggatatattaattgtcgggatacggacagtgagcgggtgatcccttttggaagccaggcaaaaaaggcattacagcaatatatgcatacagtgcggaacgggttcctgaaggagcaggaaagcgaagtgctttttacaaattgttcgggaaaaccgatgagcagacagggattctggaaagtactgaaacactatgcacagactgccgggatcgagaaagatattacgccgcatactctgcggcattcgtttgctgcacatctgatccagaacggagcagacttaaaaagtgtgcaggagatgctgggacattcggatatatcgacaacgcagatgtatctgaatatgaatgtgtataaaatcagggatgtttataccaaagcacacccgaggaaataagaggagagaaattattatgagtattcaactgttgaaaaaactgccaacaccgacggagataaaagctgattatccggtgacacagaaagtggcacagatcaaagcggagagagatgagatgatccgaaaagtatttaccggagagtccgataagtttctggtcatcatcggaccttgttccgcagataacgaagaggcagtttgtgaatatatcaaccgtctgtccagggtacaggaagaagtggcagataagctgatcctgattccgagaatctatacaaacaaaccgagaacaaccggagagggttacaaagggatccttcatcagccggatccggagaagaaaccggatctgctgcatggtctgatcgctatccgtaagatgcatatgcgtgccatcgaggaatcgggtctgacagcagccgacgaaatgttgtatccggaaacctggagatatctggatgatattctttcttatgttgctattggagctcgctctgtggagaatcagcagcatcgtatggtagcaagcggtatggatgttccagtgggtatgaaaaatccaaccagtggggatctgtctgtgatgctgaattctgttgtggcagcacagatcaaacagaactttatctacagaaactgggaggctgagacggacggcaatccgctggctcatacaattcttcgcggagcagtgaataaacatggcaatgcgatcccgaactatcattatgaggatctgcagttcctgctggaaaaatataatgagagagatctgcagaatccggcgacgatcgtggatgcgaatcattcgaattcgaacaagcagtttaaggagcagatccgtattgtgaaagaagtgcttcacagcagaaatgtttccggggatattaagaagctggtgaagggcgtgatgatcgagagttatctggttgagggcagccagaagatcggatgtgagaatcacgtgtacggaaaatcgattacggatccttgcctgggctgggaggattcgagagagttgctgcatacgattgcggagctttgttaggataaaaaacaaaaaaataagagtagttggctaaggggacgtggctggcttgcgatccatgggtggacaacttgggcagggcaactttgaactaatcactaacttcgactaattgacgctggtcagctgaccagcgccaaagtctacgtaagtgctggatttcaaagcttgccctgaacgcccaaaaagtgttgtccacccatggattgcaagccagccactggttttggcaaacgacgttaagtttggtttataaagtggtttcgagaattttggactcggtgaatccaaaattgttgtgatgcttttagagataaacgaaaagtcgtttgtgaatggtgtgaaaaagaaggcacagagtaaatctgaaaagttcgtgtgttataaaaaactgttttatgatatgtaagagaaacatggctagagcgggtctgaaaaatcatttccgcaatctgcaagctccgctttgtggtatattttactctcattcggttgccgtagcccgctacgccgccctcattcggataaaatctcctacaaattgggactcgcagctcacgataagcctttttcagacacgctctagcgtggagttttttggttgaataatttcatcatcagcaggaatattcctccggttataagaacgcttccgaacagtgcgatatatccactcattttcatttcagacagtatgtggtagagaaacagaccgcatccacatccaaggatcattccacaacagggcaggacgatccattctactgccggaaatcgaaattttacacttttatgtaaaaagatcaggtttaatcccgtaatgataagctggcttaaaagcagtccggagaggtagccgcggattcccatgtgggggattgcgaaggtcacgaagaggattcggattccaaggccggcgaggttttggatcaggcattgggcggtgtgtcccaggccgttcaggatcccggtcagagtggcggtgagatagaggaaaggacagaggaatgccaggatctgtaaaaagatgccggcgtcctggtttcggtagaagatctgtgccagctcttttccgaaaaagaagaagattcctccggataaaaagccgagccacagacagtactgaatggtctgttcggtagagcggatgattgcatcttcttttccggctgcctgctgtccggcgatggttgggaggagcatcgtggagagggcggacgtgatcgcagaaggaaataaaataaagggtaatgccataccggtcagtgcgccatacagactgagggactgtgcgtttgtaagtccggatgcttcgagttttcctgggatgaggatggcttcggtactctgtaagaggttgacgagcatgcggttcagggtgagcgggacggataaggtaaggatttcccagaggcaggaacggacgcgaaagtcggtagtgcctttataggaaggtttctggaaagcgagacagacaacgcagaagaagcatgccgccagttctccgaaaagcatgccgccaacggcgagaatcggtgtcggagcaaggttttgctccaggaaaatcaggtaaatgacataagaagcacccacccgggcaaactgttccagtaattgtgatacagccggaaccgtggttcggcgggtggaaaagtaccaggcgtggatgcaggtgtgtatggaacagaggggcagactgaaagcaagcagctgcagaagttcacagcatcggatctcatgtaagatatgaaggctgatccagggtgcgcgggtgtacagaaaaaaggacacgatcagtgaaagtcccacagaaagtccgctgccactcaggaaaaatacccatccctttctcggatttcccttggataaagcggcggagcagcagcgggataaggcactctgaatgccggcggtgacaccggacaggcagaaggcatagaccgggaaaatcatctggtagattcccagaccctgtgcaccaatggtgcgggataggaatatcctataaaagaagccaatcaggcggctcaagatacctgcacaggtgaggatggcagtaccgatgaggacaggatgcttcgcagaagaaaacataacaagctccggggctttttttaaatatatgaggctgccagccttgacagaaccggggagtcgtgttatattgacaaagggtcatatcccagtagattactagggaatctgaaagaccaaaggaaacttccggaagggaggcaacatgaaattatcaacgaagggcagatacggtctccgagcgatgatcgatctggctgtatatagtgaaaaagaaccggtgtctatacagagtatagcggatcggcagaacatctccgagcgttatcttgaacagctgatggccagtctgaaaaaggaaggactggtgaaaagcatccggggagccaacggagggtaccagctggcaagaccggcaatcggtatctcggttggagatatccttcgtgcactggaaggagatctgcgggcagtaacctgtccggcaaacggcgaagaaggaaacggtggctgcgaaaatgcagatctgtgtgtgacgcgatatgtatggcagcgcatcaacgaaggaattactcatgcagtggataccatgtatctcaaccagttggtggaagagagtaaaaaactgaaagaaaaaggacaggtacagcctgcaggctgtcagggataggaggcaaaatcatcatgaagaaaattatttatctggataatgcggcaaccacaaaagttgcaccggaagtagtagaggcgatgctcccgtattttacggagtactatggcaatccgtccagcgtatatgaactggcaggaatcagcaaaaaagcagtgacagaaggaagagaaaaagtagcttctgtcatcggagcgaacccgaatgacatctactttaccgcaggcggttccgagtccgacaactgggcactgaaagctacttacgaagcatataaatcaaaaggaaaccatatcatcactaccaaaatcgagcatcatgccatcctgcatacctgtgaatggctggaaaaacagggtgcaaagatcacatatctggatgtggatgaaaatggtgttgtagatcttgatcagttgcagaaggctatcacaccggagaccatcctgatctctgtaatggcagcaaacaatgaaatcggtactctgcagccaatcaaagagatcggtgctattgcaaaagaacatggtattttattccatacagatgccgtacaggcatttggtcagattccgatcaatgtagatgagtgcaatattgatatgttaagctccagcggacataagatcaacggaccaaaaggtatcggatgtctgtatatccgcaaaggactgaaactgcgttccttcgttcatggtggtgctcaggagagaaaaaggagagccggaacagaaaatgtaccgggtatcgtaggatacggtgtggcagcagaacgtgcacttcgtaccatggaagaacgtaccgcaaaagaaatcgaagtaagagattacatgatcaaaaagatccaggaagagatcccgtactgcaaactgaacggacatccaacactgcgtctgccgaacaatgtaaacttcagcttccagtttatcgagggagaatctctgctgatcatgctggatatggcaggtatctgtgcatccagtggttccgcctgtacttccggatctctggatccttctcatgtactgctagctatcggactgcctcatgagatcgcacacggttccctgcgtctgacactgagcgaagaaactacaaaagaagatgcggacttcgttgtagaacagatcaaaggtatcgtagagcgtctgagaagcatgtctccgctgtacgaagacttcatgaaaaaacagaataaataataaaaaagattaacatacgaatatacggaggaaatatagatatgtatagcgaaaaagtaatggatcattttcagcatccgagaaatgtaggagaaatcgaaaacgccagcggtgtaggtaccgtaggtaatgcaaaatgtggagatatcatgagaatgtatctggatatcgatgacaacggtatcattcaggattgcaaattcaaaacattcggttgtggtgcagctgttgcaaccagtagtatggccactgaactggtaaaaggaaaaactattcaggaagcactggaagtaactaataaagctgttatggaagcactggacggactgccgcctgtaaaggtacactgttccctgctggctgaggaagccatccacgcagcactgtgggattatgcggagaaacatcacatcaagatcgaaggcttaagcaaaccgaagtccgatatcagtgaaggggagaccgaagaggaagaatattaatgaaaaaaaaggtagttgtagggctgtccggaggagttgactcctctgtggcagcctggctgttaaaagaacagggttacgatgtgatcggagtaaccatgcagatatggcaggacgagccggagctgatccaggaagaaaacgggggatgctgcggcctttctgccgttgacgatgccagaagagtggcacagatccttgatattccatattatgttatgaatttcaaaaaagaattcaaggcaaatgtcatggactattttgtggacgagtatctgcacggccgcacaccgaatccgtgtatcgcctgcaaccgctatgtaaaatgggagtccctgctgcaaagaagtcttgccatcggtgcggactatattgccaccggacattatgcaagaatcgagcagctgccaaacggcagatatgcgatccgcaattctgtgactgcggcaaaagatcagacctatgcactgtacaatctgacacaggaacagttaaagcggacactgatgccggtaggtgagtactccaaagaccagatccgtgtcatggcagaaaagatcggacttccgaccgcacacaaaaaagattctcaggagatctgctttgtggatgataacgattatgcaggatttatcgacgggtacggtcagggaaaagtgccggaaggcaattttgtggacaaagacggtaaagttctcggacgtcacaaaggaatcacccgttatacgatcggacagagaaaaggactgaatatcgcgcttggaaaaccggtatttgtacagaagatatgcccggaaaccaatgaagtggttcttggaagtaacgaagatctgtttacgaccactgtgcgggcaaaccgcctgaattttatggcagtggaagacattccggaagagatcggagctctcggaaagattcgttataatcacagaggggatacctgcaaagtaaaacgaatcggtgaagacttactggaatgccactttgatactccggtcagggcagtgacaccgggacaggcactggtactgtaccagggagagtatgtgctgggagggggaaccattgtatgacgggccggaaaggaaccattccatatgaaggaagaataactgcagactgtcatatccacacggaattttcgtcggacagcgagacaaaaatcacagatcagatagaacgtgccatcgcactgggactggatcatatctgttttacagatcatatggatatggattatccggagggagaattcgaactggatacggatgcctatgtaaaacgggtactggagctacaggaagaatacaaagaccggatccgcatctgccttggtgtggaactgggcatgcaggagcatctgaaagaccgccagcaggcctacattgaaaaatatccttttgatttcgtcattggttccatgcatctgatccacggagaagacccttattttggaaaaatatatgaagaaatgggggatgaagaggcgtatcgtgaatacttccgggcaactctggaaaacttaaaaagagcaccgaagatccatacactgggacatctggactatgcggtgcgctacgggaaagagaaagacagatattattcctatgagagattttcacaggaaatcgatgcgatcctgcagtatctgatcagtcatcagattgcactggaagtaaatacagcaggtcttcgaatgcttggctttaccaatccccacccggatgtgatccgcagataccgggaaatgggcggagaactgattacagtcggttccgacggtcatgtgccggagtatctgggctatggatttgaccgacttccggaattactgtctgactgtggattcgattcttatacagtgttcagaaagggaaaaccggaattcagaaaagttttggtgaaaatttgaaaatatgcttgaatttttcaggcaaattaggtagaataattataggttgatgtttctttaacaatcttatagaaacctcacaaattttatttactttttaggaggaatgaaaatcatggcagtaaaagtagcaattaatggttttggacgtatcggtcgtctggcattcagacagatgtttggagcagagggatttgaaatcgttgcaatcaacgacctgacttccccaaaaatgttagcacacttactgaaatatgattccacacagggaaaatatgctctggctgacacagtaaaagctggtgaagattctatcactgttgatggaaaagaaatcaaaatctacgcaaaagctaatgcagctgaacttccttggggagaaatcggtgtagatgtagttctggagtgtactggattctatacatccaaagacaaagctcaggctcatatcgatgctggtgctaaacatgttatcatttccgctccggctggaaacgatctgaaaacaatcgtttacaacgtaaaccatgaaactctgacagcagatgatcatatcatctctgcagcttcctgtacaacaaactgcctggctcctatggcaaaagctctgaatgacctggcaccgatcaaatccggtatcatgtgcacaattcacgcttacacaggagatcagatgactctggacggaccgcagagaaaaggcgatctgagaagatcccgtgcagctgcagttaacatcgttccaaacagcacaggtgctgcaaaagctatcggtctggttatcccggaactgaacggcaaactgatcggttctgcacagcgtgttccaactcctacaggatccacaactatcctgacagcagttgttgaaggtaacgtaacagttgatcagatcaacgcagctatgaaagcagcttctaacgagtccttcggatacaacgaagacgaaatcgtatccagcgatatcgttggtatgagattcggttctctgtttgattctactcagacaatggttctgccactggaaaacggtacaacagaagtacaggttgtttcatggtatgacaatgagaattcttacacaagccagatggtaagaacaatcaaacacttcggaaaactgctgaatgcataatccataggctcattgggggtccggtctctttggaccgggctccttttttatacagctgcggctgtaattgcacagatgtgcgaataataaaaaggaggcatatgccaatgcttaataaaaaatctgttgatgatatcaacgtaaaaggcaaaagagttctggttcgttgcgacttcaacgtacctctgcaggatggaaagatcacagacgagaaccgtctggtagcagcacttcctactatcaaaaaactgattgctgatggtggaaaagtaattctgtgttctcatcttggcaaaccgaagggagagccgaaaccagaattatctctggcaccggttgcagtaagactgagcgaactgctgggacaggaagtaaaatttgcagctgatccggaagttgtcggaccaaacgcaaaagcagctgtagaagctatgaaagacggcgaagtaatccttctggagaacacccgttatcgtgcagaagaaaccaaaaacggagacgaattctccaaagaactggcttccctgtgtgatgttttcgtaaacgatgcattcggaaccgctcacagagctcactgctctaacgtaggtgttacaaaatatgtagatactgctgttgttggatatctgatgcagaaagagatcgatttccttggcaatgcagtaaacaacccggaaagaccattcgttgctatcctgggtggagcaaaagtttccagcaagatttccgtaatcaacaacctgctggataaagtagatactctgatcatcggcggtggtatggcttatactttcgcaaaagcagaaggtggtacaatcggtgtatccctgtgtgaagatgactatctgcagtatgctctggatatgaagaaaaaagcagcagaaaaaggtgtaaaactgcttctgcctgtagataacagaatcggtgatgaattctctaacgactgcaacatgaaagttgttccatgtggacagattccggatggctgggaaggtctggatatcggaccggaaacagaaaaactgtttgcagacgctgtaaaagatgctaagactgtagtatggaacggaccgatgggatgcttcgagatgccgaacttcgcacacggtaccgcagcagtagcaaaagctctggctgagacagacgctacaaccatcatcggtggtggtgattccgcagcagctgttaatatcctgggatttggtgacaagatgactcacatctctaccggtggtggagcttccctggaattcctggaaggaaaagaactgccaggtgtagcagcagcaaacgataaataagaatcagatcctggaaaggatacaagaaaagaggaaacgtaacatggctagaaaaaaaattattgccggtaactggaaaatgaacatgactccaagtgaggctgtaaaactggttgaaactctgaaaccactggtaaagaatgacgaagtagacgtagtattctgtgtacctgctatcgacatcgttcctgtagtagaagctacaaaaggaactaacatccaggttggtgctgagaatatgtacttcgaagaaaaaggtgcttataccggagaaatctccccgaacatgctggtagatgcaggcgtaaaatacgttgttctgggacattccgagagaagaggatacttcggagaaacagatgaagatatcaacaaaaaaatgcacaaagcattcgaacatggactgacacctatcatgtgctgtggtgagtctctggaacagagagagcagggtgtaaccatggacttcatccgtcagcaggttaagattggcttccagggtctgacagcagatcaggcaaagaaagccgttatcgcttacgaaccaatctgggcaatcggaaccggaaaaacagctactactgagcaggctcaggaagtatgcggtaaaatccgtgagtgcatcgctgaagtatacgatgatgctacagcagcagagatccgtatccagtacggtggatccgtaaactccaaaacagcagcagacctgtttgctcaggcagacatcgatggcggactggttggaggcgcttccctcaaagaagaattcggacagatcgtaaactacaaataaatccttacatttgtaaaaagtaaataaagaaacgtgtcaaaacgccacgaaacgcaagaagatctggtgatattcagcagatccaatgcgcttcgtggcgttttataattttatcatgatcacttttaaatgaaaaatacacgatcatttaaaacgtgataattttacaaaatatcaatatactctccggcgagggctttgttcatgcttctgacagcacagaatttgccgcacatgctgcaggtatcgctgtggtcatcttccggcattctgctggcgcggatggatttggcagtttccggatctaaagcacaggcatactgggcatcccagtcgagcacacgacgtgcatctgccattttatcatctatatcacgggcgccggggattcctttggcaatatcagctgcatgagctgcgattttggaggcaatgattccctgcttggtatcttctacatttggaagagccagatgttcggctggtgttacataacaaaggaatgcagcaccgttcatggcagcaacggcgccaccgatggctgcggtgatatggtcatatccgggagcaatatcggtgacaagtggtccgagtacatagaaaggagctcccatacagatgctctgctggactttcatattggcagctacctgatccagaggcacatgtccgggaccttccaccataacctgtacattatgatcccatgcacgttttgtcagttctccgagacggaccagctcttcaatctggcatacatcggttgcatctgccagacatcccggccggcaggcatcacctaaagaaatggtcacatcatattcttcacagatatcaagaatttcatcataatactcatagaatggattttcctctccggtcatgctcatccaggcaaaaaccagacttcctccacggctgacgatattcatttttcgtttgtgctttttgatctgctcgatggtttttcgtgtgattccgcagtggagagtgacaaagtccacaccgtcctccgcatgcatccggatcacatctataaagtcttttgcggtcagagttgcaagatcacgctgataatgaataacgctgtcatagacaggaaccgtaccgatcataaccggacattcacttgtcagtttacggcggaaaggctgggtatttccatggctggaaagatccatgatggcttcggcaccgagttccacagcgctcattactttcttcatttcgatatcatagtctttacagtcacgggaaacaccgagattgacattgatttttgtgcggagcatacttcccacaccttccgcgcttaaacaggtgtgatttttattggcgcagattgctactttaccttctgcaacaagcgtcatcagtttactgacatccatatgttccttttcggctacaaggctgatttcgggtgtgatgattcccttgcgtgccgcatccatctgagtggtgtaatttctcatgttgttttgcctccattcttttcacatacataataaaaaagtatctgtttttgacgtcagcaaaacacagacgtatccatgcagaacaaaaatccatacgtccggacaatatatagaagtagttgctgacgcctgcatcagaaagcaggttccgggtttctgatgctgaacaaaatcataagatcttgtcttttttatagcggtacaaggtggtgtccccaatgtatcgcttttgacagacggatatattgcgagaaggaacagttcggcggcttcttgtggaggactttttactatgcagtaaaaaaggacccttacctgagtaaggatcctgtgatctgtatgacgaaaaaaggaaacagtgtgtatgtatacttcttttgtccggtatatctttcctacgttggcattatccaaatcaggttttcgggtcgaaacggaatcacgtctcctctcagccggctttcaccagctccccgtcagcaatataaaggttgtcttggtgttattatgtatcagaatagatgaaaatgcaagagaaaattcagaaacagtagtgtctggcaggaaaattcggagaaatttcagtgtagcagacacttcgcacttcacaagttcactttagtgtggtaaaatgggcgaaaagtgatgttgccctctgtggcggaaaaggagaaaaaggatatggcagaaagagtcattaaagcagctttgcttggttttggcaccgtaggtggtggtgtatataaagtgttaaaaatgcagcaggaagagatggtttcaaagctgggagccagagtggaactgaagaagatactggttcggaatatagagaaagcggctcagaagacagacgatccgtcactgcttacgaataactggaaagagattgtagacgatccggagattgagattgtaatcgagctgatcggaggcatcgaaccggcgagaacttatattctggaagcactggaggcaggaaagaatgtcgtgacggcaaataaggatctgatcgcagcggacggtcacattctgttagataccgctgcaaagaacaaaaaagattttctccatgaagcagcagtggccggcggaattccgatcatccgcccgatcaaacagtgtctggcaggcaatcatatttctgaagttatgggtatcgtgaacggtacgactaactttatcctgaccaagatgagccagaacggtatggaatttgccgatgctctgaaactggcacaggatctgggatatgcggaaagcgatccgaccgctgatgtggaaggtctggatgcgggaagaaaagtggcgatcctcgccagtgcagctttcaattccagagtgacttttgatgatgtatataccgaaggaatcaccaaaatcacggcaacggatatcgaatatgccaacgagatgggatgcgtgatcaaacttcttggcgtggctagaaatacaccggaaggaatcgaggcgagagtccatccgatgctgatcgatgtgaatcatccgctggcatcggttaatgacgcctacaatgccgtatttgtacagggagatgcggtgcaggacgcgatgttctacggccgtggcgcaggagaactgcctacagcgagtgcggtagtcggtgatgtctttgatatcgtaagaaatattctgaatgactgctgtggaagaatcggatgtacctgttataagaaccttccgatcaaacatatgaacgagatcagcagcaaattcttcatccgtatgttcgtggaagaccgtccgggtgtcctggcaaatatcgccagcgtgttcggcaacagtggtgtgagtctggcacaggttatccagagaagaaagaaagatcagtatgcagagatcgttgtgatcacagatgaagtgaaagaaaagaatctgaaagatgcactggcagtggcaaaaggaatgtctaccgtgaaagaaatttccggtatgatccgtgtggcataaataacttgcaagtcctctcatataaagttataatgtaactattcgttaatagtgacgaaagtgttacaaaaacaggaagaaatatcaggcaaaatgccgataaatactgactgaagactttatatgggaggattttttgcatggaacagtcaagagcctgggtgcaggcgttaagagaaaatatcggaaaggttctggtcgggaaagaggagactattgatctggtactgaccacactggcagcgggaggacacgtacttctggaagatgtaccgggaaccggaaagacgatgctggcgaagtcattatccagatcactggatgctgatttcggacgtattcagtttacaccggatcttctgccatcggatatcactggactgaactattataatcagcaggcaggtgaatttcagtttcgcccgggtcctgtatttgccaatattattctggcagatgagatcaaccgcgcgactccgagaactcaggcaagtcttctggaatgtatggaggaacgccaggtgacggtagacggggtgacaagaaaactggcagaacctttctttgttattgcaacccagaacccgttggaaacgacaggaactttcccccttccggaagcacagctggatcgtttctttatgaaactgtcgatgggactgccggataagaaagaagaagtgggaattttaaagcgttttatactggatcagccgtatgaaacattgcaggcagtatgtaaaaaagaacagattctggcagcgcgggagcaggtaaagaaggttcatgtacatgaacttctgctggagtatatggcagatctggtacaggcgacaagaaaagacaaagagattctgtccggtgtgagtccacgtggaacgatggcgcttcttcgggcatctcaggcgtatgcatggatccggggaagagactatgtggtgccggaggatatcaaaacagtagccggtcctgtcatggcacatcgtctggtattgtcaagaggatttggcggggcagttaccggtcagacaaagattgaggagattctgggacaggtgagcgtgccgacagaagaatgggagagatagcagatgatcattatagtagtactgatcggtgcatttgtgatgaatgctgtgctggtgaagatctacgggcatctgtgggaaaaacatctggatgcccgtgtggaattccagaaagaaccttctctggaagggcgggatgccatactgacggaaaccatctataacagaaaatggctgtttcttcctgtattgcaggtgggatttcagatgcaccggaatcttcggtttgccgatggagaaaatacaagtgtctcggatcaatgttataaaagagatatcttttcggtaggcagttatcagaaaattaccaggacaatttcattctactgttccaggcgtggatattatgaactgtcccaggtggaactggtgacaagaagtccgctgatgaatggaaaattctataaaacactggaatcgccggatcatttttatgtttatccgcggatggtggatgagaccaggctggagatcccctttcagaaaataatgggaagtgtgctgtcacggaagaatctgtatgaagatccttttgaatttcggggaatccgggaatatcagccgacagatccgatgcataagatcaactggaaggtatctgcacggacggatcagtggatggtcaatctgtatgattccacatcggcacaggaagtggtggttttgctggacgtagaagacgagaccatctggaaatttgatgggatccacgaagaggggatccggctggcagcagccctggtttcccgtctgctgcagaacggaattcctgcgggaatccgtaccaacggacgagatctgaagacaaaagcatgtttcagcctggaaccaggtaccggaccccagcaggtacgggcgttgtatgaaggactgacgcggctggatctggatcagaaggaagaacacatggaagtgatcctggatcgtctgtgggaagaggcgaacagggaaaaccggacgtatgtgatgatttccaaaaatcagagagaaagctgttatgaaggattctgccggcttctgaacgaaggcggaaccggtgtatggatcgctaccttatatgaggatatggaatggaaacttccggacagtcggaatatgacagcacttcgatgggaggtggcaaaatgaagcagttgaagataaccaaacgacaggcggcactggtacttctggaactgtgtcacggatttttgatcttatttgccatctatgcgtgtgcggtggtggtatccgggcatggaagcgaaccgtttgtactggtagggtgtctgctgtttccgctaaatgcaggcatgtttctggcagagaagaaagcaactcatttctggcagtttggaatcgttgcagtgttcctgatcggaggatctgtgatgattgccggaaccggcgttcgcgggatctggacagggcttctgggaattcttgtggcattctcctatttttatgccagggcatcaaagaaaacctgttggttaaagataccgttgtatccatggcttgggattgatctggtgctgtattttcttggtcagcattttgtgtcggatacggcgattcggattgctccggttcttgcggcattatattatctgctctgtaatttccatatcaacctgaaagaggtggattcttttttaaaaacacatgcatctctggaaagacttccggtacggcggctggctaagatcaaccaggggatgatgtggctggtttccgcagttacggcggtggccatgatcgcagctccttatctgggtattgatcagctgatccggaagggtggtcaggcgttaaaaactgtgatacgctggctgctgcatctgattccgaattcaccggccgaagagggaacgatggcagcagagcagacgaaccagatgatgcaggcgactgccagcagagagattccgtggtttttggaactgttgtacaaattgctggatctgatcggctggatgatcggtatcagtctggtgcttgtgtgcgtttttgttggagtgcgggcgctgtatcgattgtatctgcgttttaatgaaaagaccgaggaaaacggagacaagatcgaacgattactgccaccaccggcagttgaaaaaaagaaaaatctgaaccggaaaaagaaagaacatcttttctggaatcgatctgcagatggaaggatccgaaagcactatcggaaaaaagttctcgaaaaactgaaaggatccccggacagtgcctggacaccaacccagactgcaggtcacatggagctggaggatgccgatgcgaaagtatttgcacagatttatgagaaagcgcgatatgcaggaacatcctgcacaaaagaagagatggagaagatgcttcggacacgataaaactcttgtggagcagaaaaagctgaaagtactgtaaactttcggctttttctttttatggcttactttctttgtacttctgtggtacaatcgtgtgtgcatgtccattatgggatgtaaagataaaatggagggatactcaagtatgagcaagaaaaaaggagaaggcctgaaatcatttaacaaagggtttagcgttccggacacttacattattattttctttgtggttgtccttgctgcgatcgttacgttctttgttccgaagggctactacgaaacacaggatgttacgtacatgatgaacggggtggagaagacccgtacggtaattaaagatggaagtttccagtatctgacagacgatgcgggaaaagcagtcacagaaggggttaccttattcagtggtgacggcgaaagcggtttctttaattacatgtttaatggaattgtcagcgattctgcgattcagatcattgcatttttgctggtagttggtggtgcgtttggtatcatgattcggacaggagccatcgaagcgggactggtcggactgatccgcaaggcaaaaggggcagaaaaattgctgattccggttctttttgtactgttttctctaggcggggctgtttttggaatgggagaggaagcacttccgtttaccatgattttgtgtccactgtttgttgcggttggatatgatacggtcattgcagttctggttacttatgtggcaacacagattggttttggtgcttcctggatgaacccgttttctgtgggtatcgcacagggaattgccggtattgatgtgttttccggtgcgggattccgtatggtgatgtgggtggtatttactgcactcggctgtggaatgaccatgttctatgcagcgaaagtgaaaaaaacaccgacgatctcggttgcttataagacagatcagtatttccgtgagcagaacgagaaaacgggtatcgatgatggtcattctttcgggatcggacacattctggttctgcttacactggctgttaccgttgtatgggtagtctggggtgttatgaaaaaaggatattatatgcctgagatcgcgacacagttctttatcatgggtatcgttgcaggtgtgatcggcgtgatgttccatctgaacgatatgaagatgaatgatattgcaacttcttttaaaaatggtgcaaaagatttgatcggagcggctctggttgtagccatggcgcagggaatcatgcaggtactcggtggttccgatccgacaactccaaccgtgatcaatacgatcatgtatggaatctccaaagcactggcaggactttctggtgcggcagcagctgtgctgatgtatctgtttcagtccgtatttaatttctttgtggtatccggatccggacaggcagcagtcacgatgccaatcatggctccgctggcagatctgctgggagttacccgtcagacttcggtacttgctttccagctgggagatgcatttaccaatctgatcgttccgacttccggatgtctgatcggttctctggctattgccagaatcgagtggtccagctggatcaagttcatgtggaaatacctgggtgtgctgatgatcggtgctgtgatcacgattttgatcgcggttggaatcggattctgatgatggtattgttcacggaaacagattgaaggaaaagggaatctattgtaaaataaagcgtgtaggtggaaaattattttccactacacgctttttgttctttttgttgaaaggaagcatttaatatttatgttgcaggaaggattacagacgtatgaaattaattaaaaatatcaatgtatatgcaccggaacatcttggaaacaaggatgtgctggtcatcggagataaaattgccaagatagaagaggcaggatgcatgccggagataccgtatctcacagcggaggatattattgacggcagtggaaagattctgacaccgggttttattgactgccatgtgcatattcttggcggtggcggagagggcggttttgccaaccgcacaccggaagcgacggtggaagggcttacaaagttcggtgtcaccacagtggtcggatgtcttggaacggacggtatcggaagagatatgtgcgcactggtggcaaaaacaaaagggttatgtgaacagggaatgtcagcttactgttataccggaagctatcagatttcggtgcacacactgacggacagcattacaaaagatatcatgatgattcaggaaatcatcggaaccggagaaatcgccatttccgatcatcgttcttcccagccgacgtttgaagaattcgttcgtgtggtggcggatacgagactgggcggtgttctttcgggaaaagcaggtgttgtcaatgtgcatctcggggacagtccgagatgcatggatctgatcgagcgcgtggtggcagagaccgagataccggcctctcagattcttccgactcatatcaaccggaacgagaaactgttctgtaaggccactgagtatgcaaagaatggtggaaatgttgattttactggcaacgaagatattgattactgggaaactatctgtgatgaagtcagagtatgcaacgggatccggcggatgatggaagcaggggtggatccgaaacacatcaccatttcttccgatggtcagggaagcctgccgatgtatacggccggaggagaattccttggaatgggcgtcggacagtccagttgtctcctgaaagaggtcaaagagtgtgtatgtaaagcagacattcctctggagattgccatctccaccatcacggccaatccggcgcggattctgcagttgaaagataagggaaagattgaggaagggtacgatgcggatctttgtatcctgaatcaggaactggatctcgtggaagtgataataagaggaaaatgcagagaaagcatctgctgacaggaactccctacttgcgggaagtttcataaagtgctatagtgtgaaaagcaaaaaataaaggagtttagagaaaatgagaacagcagatttttattatgatcttccccaggaactgattgcgcaggatccgttggaagatcgttcttcctccagactgatgcacctggacaaagagacaggggaactggagcatacagattttaaacatattctgaattatctgaaaccgggcgattgtctggtggtaaatgatacgaaagtaatcccggccagactgtacggacataaaaaagagaccggagctgtgatcgagattcttctgctgaaacgcagagagaatgatatctgggaatgtctggtaaaaccgggaaagaaagcccgcccgggagccgtgatcgatttcggagaaggattactgaccggggagatcatcgatgtggtagatgagggaaaccgtctgatccagttccattatgaaggaatctttgaggagattctggatcagctgggggagatgccgctgccgccgtatatcacacataagttacaggataagaaccgttatcagaccgtatatgcaaaacacgaaggatctgcggccgcacccactgccggattgcattttacaccggaacttctggagcaggtaaaagagatgggtgtgaacatcgcgcatgtcacccttcatgtaggtcttggaactttccgtcctgttaaagtggatgatgtagagaaacatcatatgcattctgaattctatattgtagaggaagatcaggcaaaattgatcaatgacacaaagaaaaatggtggcagagtgatcgcggtgggaactaccagctgtcgtacactggaatccgcaacaggagaggatggaatcgtaaaagcaacaagcggctggaccgagattttcatctatcctggatacaggttcaaatgtatcgatgctctgatcacaaacttccatctgccggagtccacgttactgatgctggtatctgcgctggcagggaaagaaaaaatcatgcatgcatatgaagtggcagtacaggaacggtacagattttttagctttggggatgcgatgatgattttgtagaacgattcactacaaaatagcgatacaacggaatatggagatatgaagaaagccaggggcgattaaacctctggcttttctttgtagatgaacgtgtgagacaatccgttgcggaacgtgatagagtgaacggctccgtctttgaaaacgatgttgtctatgatgctgctgagaaaagaatcaagaacctccggagaaacggtagcactcagtgactgaaagctgacgtagtttcggtcagtgagcttctgggagagtatgaagttgcttgccttggagataaattcatcatcagtgatagactgttgcaggctgtcttctgatgccaggaacgccaacttatcctcgacttcttccagagagtccgaaagctgaatcttttgagtgaggtattcggattccgacatggctttttcggaatagaggaacagcttgttcagacggtcaatagctctctccagacggattttttcctttttgagcttcgatagctgcaacggcggctcagagtctgttttgattttgacgtcttttccgaaaacttcgcctttgacagtgccggtgcggagcgtatgaaacagatcctgtaatccgtccggggcaatggcggccaccggggagaaggtatcgccagagagtagctgttgttccagttcctgtatgctcgtttccggagagaacgccttttgagcgttgagcatattgagaatgtagttgaagacgaactcgccaatgattgggtctgaggtagattttccagtacaccacagcttactttttcggtgcgtagggcagaagtagagagaatagcgtctgccggtagtcttctttacggtggaaatagaactcgtcataggctggccgcaatttccgcagataagtaagccggagaaaatgtgggtgtatttacttttaccactcttgcggaacgatttgagcctgcggttggattccaagagtgcaaggatacgttctttctgtccccggcttacgatggccgggtggtggtcttttacggtaatccattcagatttatccttaggacgctgccggtctccttccttaaggcggttgtactggtaatcgccgcagtagaatacgctgcgaaggataatatccagagagaccggggaccagtcattaccggcacgagtccggtagccatgttcgttcagataccgggccagataaaccagggaacggagttcttcgtatttgtcatgaatcagatgggcgatgttgtattcatcggagttgaagctgaaagtctgttcttccgggtcataatcgtagccgtaaggaatacgtccaccgttccactgcccgttgctggctctggaaatcatggtggcagcgacacgttctgaggtcatattgcgctccagctccgcaaagacaaggataattttgagcatcgcttctcccatagccgtactggtgtcgaactgctcgtttttcgagacgaaggtaacgcccaggtctttaagctcttggtacatctcggcgaagtccagaaggtttctggagattcggtcaatcttccagaccaggagatgtgtgtatgtgccggtccggagctgagacatcattttctgaaattctggccggatagtatttttaccagagtacccggcatcctcgaagaccgtcacatcgtcagtgttcagtatcagcttggcgtatgcaatcaagtcttgacgctgcataggcagagagtccctgtcaatctgatgcagggtagagactcgtatgtagatagccacttttgcgtgagtggcagcactgtttgaaatcatatttttcctccaaaaatacgccgtcccattacagaacggcgcatgttcatttctacgcccttttaatcgggcaattcaatatcacatcccttaatccggcaaaatccgttatgtaaggttttagagctttcagtgaattaagagaaatatttttctggttgggcttttgctcgttgagcacataggtaggcaacacatagaactcccagtattccagggcaagcggcgagacatctttcgtcagtgctttgtagaggcagaaaacgtaaaggtcagaatgccgcttgacgtccggagagtatccggctttcgggtcccaggctctgtgaggagctatgctgaactgtatatgctcgtggtacgcttcgtcccaggactggaggtaagaagcggatttgacttcgattcgctgtccggtaggactggttaaatcaaaggggagccaatcaattcgcattttcgaatcgggggggggtaataacgcactgtatactatgtattctgcaagtacgccccggtctgtgttattgagcagatcactgtaagcccaggaccagaaatctactactgacaagccggtgtcttccccatgaaaagtaaatttgttgttggatgttaattgctccatgcaggaatcctcccttcgcagagagaggttatgccatgaatattgccgtcaagagcgaaaaccaacgcccggcggcagtcagtgtctgtcagagtatcggaataggtatgaaccaacggcaagaactcacgaaccgaaagcgagagtttcttccgtaggtgcgctattttgttaatcgttccggcagacagcgatgcaggcccttcctccagagaagaacagaaggaagagagatagagcagtagagccgcagcatcgcaattcagttgttcttcggtccgggccaggaaaaagtatttctttgagtccataagccctcctgtccggtatcatctgaaacgacgataccaatctaaacggataatcttttttcgccgtcaaggtatttcttgctttcctcaagagccttgaggtagcccttcatttcccctttaaattcataacgcttttctgttggcagagccttgtaaatactcagcagctccttctcatcatcagtgtaagtttcggcctggacgtcagtgtaagcagattcttttccggtcagaatgtagtcggtagagacgtgcagaaaccgggcgatgtctgcgatgtatttggctggcggcagagtgtttcgagccttccaggtagagtaggaagactggttaatgccaagaaatttgcacagtgcataaggcgtttgttccctctgttcgagaactgtttcgattctgtcgattgcttccatgtagcacctccgtaaaataattcgagaaatcgaagaaaaactctttacaaattcgagttttcgagctacaatacaatcacaagctacaaatgattcgcaaatgggaagtgctaaatcgcataagtagtttgtgattgcgtatgtagtgtacgcttgtaccgttaaattgtatcattttacttcgagaaagtaaactacatatgcaaaaatccatcagaaaggaggaaaagcataatgcagggcaatatcactgactggggcaaggaagttaagaagggtctgattgaacgtggctggtctatcaacgatttggctgagagaatcggcaagtcaagaaccagggtatccggagttgtgaatggccggatttactcggattcgattgcaagtgcaatcagtgaccttctcaacatcgaaaaggcatcagcgtccatgaaagaagcaaccagagattggtgtatggatgcaagaaaagccatgattgacctggatatgaacacaggggagctggctgataagactggttactctacacaatatctgaatgcaattatctgtggcagatggacgatgaaatgtcagctcttggaaagcggatgcagacagctgttaatgtggaaaccggaaagattgcggtggataaaaaagtcagcacagcatacaaagtggaaaaagaaaaacaggaagtctttgagagcggagacacaacggtagagatcagcggagagacacatgtgcatgtagacctggatagccgggaaatcggagaagctacgacaccgattgtggatgaaaacatggcaagaattgatacacacaagaagagaggaggctaatcatgtcgggagtaggaatcacgtttgatgaaacgcattcgttccgggactggggcttaaagctcaagaagatagagatcggaataccgaaagcaaaaactgaatatgtgagcgtaccgggcatgaatggcgatctcgaccttacggaagctcagaatggcggtatcaagtatgaaatgcgtgaactgaaattcacatttggagtaaggaactgcagttatgaaaaatggagcggtctgattagccagatcgcttctgatatccagggagtagaaaagaggattatcctggatacggataagggattctattatgtcggaagatgtgaggttgataccagcaagtcaaatgatgttacagctgagatagcggtcacatgcacatgcgagccatataagataagcgttgcatcgtcagacgaaccgtggaagtgggatacattcaacttcctcaatggagtgatccggaatacgtcagacatcacgatcaatgcttcatccagctggcagaaagtcactttggacggctgggttcacaatgaaacgctcagaattgtatcaaatgcagaaatgaaagtgagataccgtaactcgacatactcaatatctgttggtgaaaatatcatgtatgacctcattctgtataaggggtcgaatgacctatatttccaggggacaggcaagattacactgattcacagaggagggatgctgtagatgtatacgattaaagcctatgtggacggcatggaatacacgctgcatgattccagagtaaaggcactgacggttggaggaaagccatactttgaagtgggtgataacatcaacggttctgcatctttcagtgtatacccgaatcatccgtattacgacaaggttaagaagttgacaacggatattattttttaccggaatgatgagccggagttttacggaagagtgctttatgacgatgaaaacttttccggaacaaagaaagtgttcgtagagggagagctagcctttttatgtgacagcatccagagaccgaaggtataccacaacatctcagtgaaagcatacgtgcaggatctgatagatattcacaattcacaggtagaagaaagaaagcagtttactgtcggacgtgttacagttaaggattccaatgattcgttgtaccgatattccaattacgaagacaccaggacaacttttaaagagaaactgataagcagacttggaggacatttggttatccggcatgtagacggacttagaatcctagactacctgtcggacgaagactactacacgaaaaatacccagggtatccggtttggaaagaatctgctggatttctcgaagaacatggatgcatctgatttggtcacatgtgtaattccactgggagcgaagctggacgaagaagaccaggatccgtcattagaagccatctcagatcagagaataacaatcgcaagtgtcaatggaggcgttgactatgtaacagatgataatgctgtaagggaatacggaagctggcatccggttgtaaaagagctgaaaaaattattggatgagataggggagaagcggtatgaagattgaaccaaggaaagaatcggacagaggcggttggctgtgtatgccgttgttagccagtgtgccggaaggaaaagaaggatgggaaaaggtgcgttgcccggtatgtggagcactttgctggaaaagaccggaggatgcaggcgtgatttaccatagcaatctcgacggagcgtgttgtacgttatgtgctttgaagaaaggagctggcaggttatgaaaagaagtgagcagatcgtagaattgatggataatgtaaagaagattatctcacagatggcagtggtggatgtatgtgaggaagagaagccggtagaggttggaaaaaccatcatgacaagccgggaggtggcggatatgttccaggaatatcactcggttacatatcgcagaatcgcacagcttatcgtggagctggaaccgatggagcagacagagttcaaaatggcacagttcaaggcaagacaccaggagtacccgatgtgggaactgactgaaaaagcctgcaagctctatctggcgagaatgaaaagagatagatgctacgggaaaaagaagaccggcattgagaagatggaaaaagaacttcgctgtcgggtaagtggccagaaactagtaggggatgcagagagtggatacaaggacgtccgggaactgttcaatcagtttattaccggtccgaagggcgaaaaccgggagattccagaactgacgcaggcctacgaacggctgagagcggttatggaggcacaggttcctggggcaaaagctgatacggcgataacatctgcggtatacgatgtggcgatagagtcagaaatgcaggggttcatttacggatttcagttgttcggagcggttctgcagggatgtggcagttcaagaagatgtgccggagaaaattaagggcagataggaggaatcatggaaaataagttagtaaagctaaaaccatgcccgttctgcggctgcggagatagaagagtgggaatccgcaggatgggtaacaacggatatagaatttgttgctcgaagtgtggaagtctcggacctcatgtatcagtgaaggactggaacgggcagaaggagcttgcacagaaagaggcaagagaaaaatggaatgaaagggcgtgagaaaatggatagagaagagtttatgagagagttggaagatatgttccaggatgagccggataacaataaactgaatgtggttctggaccttgcggatgcgtatgtagaatatgaatacgaggaaagaaaaaagtctgaaaaagtgcaatggggaaaagatgtgtgtgctgcggcaggagaggatacagatgaatttccggagcaggtgtttgtttctatttctgagaagttagaggatagaatgctggagaataacggcgatctggaatatgcagtagtgcaggaagttgtaaatgagttctgggagcgggaggaagggaaagatgctgattgtaagccagaataaagagaaggtgttgtggttcggaagagcctttaacgccctggaatattcagaacaggtaaaccacaagggaaagaaggaaaccgtcagacacacaatttgcatatctgatggttgtctggaagagattgcagagtatcagacaaaggaacggtgcttgcaagtgctgaaagatttctgcggagcatatgaaaatgaatgttatacggttgagttcttcgacactgcggcccaggcaacaagaccggcaatgtacaagaagaacatcgtgtatgagttcccggcggagtaatgtgaaggagggcgatgatggaacacaagatcacaatcatgaaatatcagacgatgtttccggggatgacaaaaaagctgttcgatgagaaagagagattctatcagattgcagtcatcagcatcagactggatgaactccagacaaaaggtgcggtactgcagaaaatgggaaaaccaacaaagagcggcactagaatgacgtttgcaccggtgcggagtgctggagagtatgaggcagagatgcagaggattctggaagacgggaaaaagctgggtctgaaatttgaaaagaaaaaggaggaaaagtaatggagagcagtgaagttgtaaaaatcagagtggagaatatatatccgcatccggataatccgagaaaagacctcggagatgtgacagagttggcagaatcaatgaagaagcatggagtcatgcagaacttgacggttattccggcaagtgcattgacggcagacccggaagatcagccggatgccgataaggtttcggtaatcagtgatttccatgcactgataggacatagaagactggaggcggcaaaattagcaggcctggtagaagttccatgccagattagaagcaagatttcccgtaaagagcaagtaggtatcatgctgttggagaatattcaacgtgaagaccttaccatccaggaacaggcccagggattccagatgatgctcgatttgggagatacggaagaccagattgcagaaaagaccggattcagtaaatcaaccgtccggcataggctgaatattgcgaagctggaccaggagaaattgaaagagaagcagcaggacgatgcttttcagctcacattgaaagacctgtacgaactggagaaaatcaaggatgtagagatgcgaaatgagattctggataaggccagcagttccagagatattgtgagccgggttcagaatgagattacaaatgccaagaagaaagagaatgcaaagaagctcaaagcgaagctgaaaaagatgggagtagagaaagcaccggagcagtattcgcagcagatgtacaatgggaaatggaaaacagtgattgagttcaacttagcagacgatgttccggatgaaatcaatctgccagagcagaaagggcagatgtactggtatgagatgtggcgagatttgagaatcgttacgaaagctccgaaggaaaaaaagaagccgacaaaagaagaactggcgaagaaagagcaggaaagaaagtcgaaggaaataaaagagattttgaagggaagtgccaccagaaggaaggaatttattgccggaattatctctggaaaaatcccggctcttaaagacgaaaatgcagcgagagaaaaaatctgggatgccctggtgctgattggttatggtctgtacggttcggttgcgagaggctttttcttggagggtgatgagtggaagtacagtgaagaagagagaaagcaggcaaatgagacattcaaaggattgagcatcacacatcaaatgcttgtgtttctgcatgggtcgatgattactgtaggagaaacctatgattatagcggacgctacgccaaagaaaaggcggataaactgctgaaagggtatgaagccctcgaactgtttgggtggttctttgagatggatgaggagaagcaagttctggacggaacaagtgagttatttgcacctgcggaagaaaagtaaactactgacttgccaactggcgcaaagtcggttattataataggaagaaggagctacaaagtagcggtacataagtagtgaaatgaaggcacgccctctacatgggggatgctatgtttatcagctgacgtttccttttcctgatgattgatgatgatgggaagcagtgattttgattccgcggccaagtgaatgatacagttatttcagacatgctcaggacattcccttgcggaatttctgtggagaagttccgtagagttttcgaaaagtccggagaaagaccttataattggtaagaccgtgtttttccatcagtgaagtgatggtatcgtcacaggcagagagatccttagccaggtgaatggtgcggacatcgttcagatattccaggaaggtctgaccagtgtattttttaaaaagcctgcaaaagtattcccttgagactgcgagcagggaggctgcggtatccagtgtcagattttcctgataatgttcccggatccattgcatgacacgggtaatccgcagtcggtcacgatcactgtcggctgtgacagtggaagcagtagcggtgcagtgatcccgacagagaatatataaaaattcatataatcttgcggtgaacagcagctcataatggtgcggctgctcctgaaaaatagtttccatggcatgaagagcagaaaagagctgcgcgttctgcttactttttgtgtaaggaatcaacgtatcaaatcgtaactgatcaaagtccggcagataagagcgaagctgtctggcagagatctggagaatcagatagtgacagcccggtgttctggtcatgtgaagatctccggagttgatgatcatgagatcgcctgtacgaagttcatattccacggcctgtacaatagcagaaagaacaccatctttaatgtagagaatttccacatattcatgccagtgtgccgggaagactccggcgggagagagtaccggctcaaagcgcacctgcagatgaccggtttcccggatcgtttcataatattgcaattccataaaacctcctgttaaaaatgtaataagtgaatatataattcgaaaatatcaaataagaaacaaaactttgaaaaaatcatatcaaaaaatatgaaaaatatcaatatcgacctaaaataagataaaaagatactagtatatttacagaaaataagcgataataacatcagaagtctgtgtcacagaacatggagattgtgacagaaacaagatagagtaacgcaggaaattgggaggtaagtaacagatgaaagcaaaagtgagaacgttcagcggaacaacatccaacgagataacacagcgtgagatcaataaccgtgcccttgcaagaaaagcggcagcagaaggatttgtccttctgaaaaatgagggacattttcttccggccccaaaaggtggaaagattgcactgtatggtgcgggagcagtcaaaaccatcaagggaggtaccggttcgggtgatgtcaatgagcgtgattatgtgaccatcgcacagggaatgaagaatgccggatacgaagtaactacagagggctggctggattcttatgtgaaggtctatgatcaggcaagagaagactggaaggcagcgatcctgaaaaaggcagaaaagatggaaagtccaaatgcgttctttgaggcctattcgtccaccccgttcttcatgccgtgtggagaaaaaatcgatgtggatgcagcaaaagcggacggtgcagatactgctgtatttgttatggcacgtatcgcaggagaaaacaaagaccgttttgataaagaaggagattattttatctccgaagaagaaagagtattgttggcacaggtatgtgagagctataaagatgtcgtactggtgatcaatacaggcggtcttatggatctcgcgtttgccgatgcatttgacaatatccgttccatcgtacagtatgtacaggccggacaggaaggcggcaatgcatttgccgatgtgtttaccggagcggtgaccccgtccggaaagatgacagatacctgggcgaaaacatacaatgattatccgggtgccgaagtatacagctacaagagtggcgatctgacaaaagaacgatatgaggaaggaatctttgtgggatatcgttactttgatactttcttggtaccggttcgttatggctttggttatggtatgtcttataccgattttgtgatcacagcaggaaaagtaagtatcagtaatccgggaaccatggatccgaaggtttctgtggaagttactgtgaaaaataccggtgatacttatgcaggaaaagaggttgtacagatctacgtatcctgcccgcagggagaactggtgaaagaattccgaagactggcaggatttggcaagacaaaactgctggcaccgggagaagaacagcagatgacgattacgttcccgctgtaccagctggcatcttacagtgaggatcaggcagcatggatcctggaaccgggcaaatacggtatctgggttggtaatgagttaaatacttccgtactcagtggtgcattagaactggatcaggaagcagtgatggtacagtgtgaaaatatctgtccgttaaaagaagagttaaaagagatcatgccatttgctaaaaaggtacaggcgagagaactggcatggcatgaggaactgaaagcaaaaggaatcgtgccggttgcagtgaaagcagcagacattccgacagaaaaagtggattatcagaagattccggaagtgctgccgggaagagccggagagattgttgaacagatgtccgaggaacagttggtgcagatggctaccggagaccctggaaaagatcagggtaatgcgcttggttcagcaggtatctccgtaccgggttctgctgcagagacacctctggtggcagcagaagaaccatggaatgtggcaagtatcgcactggctgacggacctgcaggcctgcgtctgaaaaaagaatatcaggtagagaacggccgtatcgttccgaccgatttcctgtctgcgctggagggcggattcttcgcagcatcaaaagagaagagaggaacttcttattatcagtactgtaccgcgattccggtaggaactcttctggcacagacctggaatctggaccttgttcgtgaactcggtgaaatgatcggaaacgagatggaactgttcggtatcaccctctggctggcaccgggtatgaacattcacagaaatccgctgtgcggaagaaactttgaatattattccgaagatccgctgctggccggtatgatggctgcttctatgacactgggtgtacagaaagtaccgggatgcggaacaacgatcaaacattatgcatgcaacaaccaggaagacaaccgtatgggttcggattctatcctgtccgagagaaccctccgtgagatctatctgaaaggatttgagattgcaatcaaggatgcacagccaatgtccatcatgacatcctacaacctgatcaacggcgtacatgctgcgaactgttacgatacctgtacgaaagcagcaagagacgagtggggatttgccggagcgattatgaccgactggacaaccactaacgtacagatccagggcgagtgtaccgcagcaggctgtatgagagccggcaatgacatggttatgccgggaatggaagaagatcatgaaaacatccgcaaagagctgaaggaaggtacactggatatccgtgaactgaagagatgtatctataataccgtaaatatcatcctgcagtccaaccagtatgaggaggccgtaagctatgaaaatcagtttgacggactgggcgagtggatgacagtaaaataaatatggaataagatcacgggtggtaatctgtgatgtgatgaaagttcgccggaggcagtaggttccggcggactttttgcgtcctgtagggcaatccttgttttcgcagtagccacaggtaaggacgttatgatataatgagcgttagcgagcgggaacaaacgaagtttgttcatcgggagcggcaaatggcgctcatgatagctgcgaaagcagcgtcaagcaccgcaggtgcgaatcatgatataatgagcgttagcgagcgggagttatatacggaggaaactggatatgatgagaaataaagaagtactgaatgaaataagaaagcagagccggactctgatcgaagaaaaacgtgataaatttgtcaagcagagcctgctttcagatgaattcatcgatatgatgcagagaaaccggaaaccgtttgatcttttgatgtcctattatcagtgtgcgatcatggagatcgagacaaaatttaaggtgttaaacgaagagtattctctggaatacgataaaaatccgatcgaagggattaaaagcagaatcaaatcctacgacagtctgttaaagaagatccgtagaaaagatattccgatgacactggaatccattgagaaaaatattacagatatcgccggtgtgcgggtcatctgttccttcccggccgatatttatgaagtggcagacagctttttgcgacaggatgatattacgctgttagagcgcaaagactatatccagaatccgaaaccaagcggctaccgaagtctccatctgattgtacaggttcccattttcctgcaggatgagaaaaaaccggtgacggtagaagtgcagttccgtacgatcgcgatggacttctgggccagtctggaacataagatgcgttataaaaagaacattccggctgagcagatgaagtacttacaggacgaactgtacgactgtgccgaacagagtgcggcactggataaacgaatgcagagtatccgtaatctgatcgcggagaacaaagaagaagaggaagaaacaaagggatttttccttccactcttttaaaatttcctgcagcagaccggtgaaaaatctgaaaaaaacgtgaactttatgaaaagcgtgtgaaattgctgtcagccgggaaaaattatggtagaataagtgtcagtgagtgaaaagaaagagggaatactatgccatattatttttatgatgcaacttatatactggtactgatcggtgcgctgatcagtatgtttgcttcctggaatgtgcagaacacgtttcgggcgtacagcagagtctggaacagcagaagcatcccatcgcaggatattgcacagatgatccttcacgatgccggaatatatgatgtgcggatcgagcggatccgcggtgatctgaccgaccattattcgccgaatgaaaaggttcttcgtctgtcggattcggtatacggatcgacctccgtagcggcgatcggtgtggccgcccatgagtgtgggcatgcgatccagcaccaggaaggatacgcaccgttaaagctgcgttctttctctgtaccgttggccaatatcggctcccggctttcctggccgattatcgtactgggactgatcctgggatggtccgggttactggagatcggtattctgttatttgtatttgtggtagctttccagctgatcacacttccggtggaaatcgatgcttctcaccgtgccattcggatcctcgaagcaaaacagctctttgacgatcaggaattacagggtgcgaaaaaagtcctgacagccgcagcacttacttatgtggcagcacttgcgtcggcgatcctgcagctggttcgactgatcctgatttccagacggaatgatgactgagaaaaaatgaaaaaaacaggaaaagaataaaacggaaatatgaaaacagatacgcccgttcagacaggcaggtaacaatggaaacctggaatgtctgagcgggcgtatttgttgttcgtcgaagtctgtgaatgtagaaaatagcgaagagaatttaaaagaatatagtaaatatatcttgaatttcgaaaaaaatatatgcataataatcaataaatggtaaccaaacaattgacaaaagagacaggtacaggaggcaaaattcgagtgacgacggaagaacttgtaaaacagatctgcaaagagcaggggataagtgtggcaaagctggcgactgcattggggcagtcacgacagaatttttataaaaagttacaacgggatacgctgaccgtgcaggaatggcaggaggcagcgaaggtactgggagtggaatttgaccagggcttcgtgcttccggatggaaccaggatgggagtttccgaaaaaagagagaaacgcacggtactgccactgatgggaagcgcatttttgcctggaaaagcagaagagacggtgaaacagtttgaagatcctaaacttcaggaaattgcacggggagaactgtattttttcagggcacaggcagaatcctgcattcagagtgtggaaaaataccagaccagtgaagatcccatactgcgtctctccgcagatatgctttctacttttgcgaactttaccctcgggaatgggagggaagcgcagatggcaaggaaagatgtggcacagatcctgagaaaatatatggaaaaagaagaagatccggaaatcatagcctcctgcctgttcgcatattacgtgaccagtgttctgatccatatcccgccggaagagggaacaccaccactggatcgttacctttcgtatcttccggtcgggcagcggctgttcgctatcagcatactgggacatgtggcttatctgaacggggagtatgcgcgggcacagggaatggtgcagactgcgatggcaatgacagagaggacatatccaatctcgatgatctatctgaattgtgtggcagccatgtgtcagattaatcaaaaggatcaggagggagccagagtatcggtatcgaccggctgggagatggcgagaaaagacagattcctggaaccgtttatagaatatcacggattgctgcagggggtactggaagccagcataagaaaaagtgagccggaagtctataagaaactggtggacggggtaatcgctttcagccgcggctggatgaaaatccataacccacagatgcaaaaagcagtgacggatcttctgacaccgctggaatattccatcgcgatacttgcctgcagggactggacaaatcaggagataggagaacatcttggactttcggtgaatacggtaaaacattatgtatccgggatactggaaaagttacatatcgacaaaagagagaaaataaaggaatttgtaaatcaataagtgaaaaaaagaagtgtctgtttttgaaactatatagaaaaaacaggcactttttttcgattgaacgggcatgttatggcacttctgattttgctaaaatatagaaaatgtgaaactgtcagatgcgaaaagtgttatcagatacaaattaagcgcgaatatggcggtgaggaaaatgcaaaaaggagaggaagtgtacatatgaaaaaacgtctgatcagtctgttactgagtgtggcagtacttacgacatccgttccggtgtcgacattcgctgatccttctgccggacaggagccggcggtctcatcggaggagagtcaggagaggggaattgactataagaaaaacgggggaacttttcaggagaactatcaggctccttcggaatatccgactgctgagctgccgggagcggaagacatcagaaaaccggggtatgaattcggtggatggtacgacaacccggaactgacagggaaagcggttaccggtctggatacggaagattatgaggggaatgtagttctgtatgccagatggatcgaacggtattatcaggtggatattcccagtgaagtatctgtggggcaggattcttttaccctgaaggcaaagtccggaggtttttatgagaacgatcagctcagtgtggcggtacattcggaaaatgactggaagctgaagtccgacaaccatgaggtgagctatgagcttcgcgataaggataccaataagatcgtggaaaatgatgcggttatcgccagcttaagtgcggatacgaagcagaccaacagaacgtttgctgcggaactgactcaaaaagccaactataccggtgattacagtgatcagttgaactttgatatttcattcagggaaacagaatatacgatccagtatgtaacggacggaggcatggtttacagggataatccggataagcccggggaaagtatggagatcacccagcagaaacttccggcgggaaccacgctgaatgatctgccgctggcagtccgaaaatccagtacctttgtcggctggtgttacgaccgggaatgtacggattatgtggacagtgaagacagacttctcggggatcttacgttatatgcagcgtataccgatatgcagctgatggagtccgtcaccatggatacatatgcccgtgcctatgatgtggcaacggattttgccatcggcatcaccaataccggggatgcactggatgatgcagagattcttgcggcatgtaagattaaaaatgtcagcgatccatcggaagagatcacgctggcagttacccggggagaggacaatacctgtaccgtcagcaatctgaaaggttggcagccgggcgcttcctacaaactgacgctgaaaaatgatcagctgtattttaccggatttgacaaaacgatccgggaatatgattttacggtttaccgggaagaaacaaagaatgtggaactgaaccgggagatccggtatatccatacacgggaactgagtaacctgaccgtcaacggacaagcggcggattccgtttccgtggcagttatgacggtaggcatagacggtgagattcagggagagggaagcgatacgaccggttcctttacctatacaaaggatttgttacagacgggggatatcgtcggtgtctattccggcgatgtgatcccatccatggatctggcagcaggtgacaacagtgatgtctcttactttgagatcaccggatgcaacggcaatcagtacgaataccggggagcaaaggcggaagatgttttatttacgccggatgtatttccaatggaaaaaagcaaagatcgggatggagatcctgacaaccattcggttaccgtggcagtcagtgaactgaccttcggagatgacgagatgagtcaggcactgaatctggatgaaagcaccaccgtggatccgggtgattacctggcactgtataccgatctgaacagcggaacgccggagtacggagagatcacaaaagtagagcagagtggtacggattatatcctggcatatcagacggtttctttcgaagagatgcaggcggctatggatgtgtatcagaaggaccaggtggaaggagacgatctgttagaagaaacagaccgggagaacctggaagaacagattcaggttcaggcgatggagagcggattcgcacaggatgtggcagaccggatcggtgctgcggcgatcgctaccgattcctttgaagaactggaagcctctctggaggaagaacttggtgcggatgtttctgtgaaatatacagacgaaaatcagagtaacgaaacagaagaagaaaatactctgatcggggatatcgcaccacagagtctgccggaaagtggcagcctgattccaaaaacttatgcgagaaaaccgggaggaacgggaaccggcaaaccgatcgtgacagtcagcctgggaacggtcagagccaatctcggtacaacactgaaacattttgacggagatgtcagcggcgtgcatctggcactggagattccggtgctggtaaatatccatttgaatgccaaagcaaatatccagatcactgtaacttccaccttcgagcaggaagtccgggtggatattaatgtagacggaaaagcggtctggaaagtatggaagattttcccgtatatcgcagattataaggtgacagcgtcgctggatctgtatgagtacaccggcattgctctggatgtgaactttaagaccgtggagggcgagggcagctccggaggttccaacaaaggctccaaactgcgaaaaggtgtcaataagatcgccggagagctgaagagcatgatggaaaacggagaagagtatatcacggacaagacgaaattctctggaagcctgggcgatgaggaagagggagaagaaatctccgtttccaagagcctggcacagcggtactcggaacttctggcagatgaaggcgactgggtggaaatctataatcgcctgctggtagataatcattttcgggtactggcgattattgatatagaagtgaaactggaatttgtggtttatgccaatatgaacatttctattggaatgtcttactggtataagaacgcaaaacgatatgtattctctctgaaagtgatggatcggaccgcaaccagcgatacaatcgatctgtgtgaagagcagtatgaactgactgcctatgcgatgggtacgctgggactgaaagccggtgtgcggctgacggtagcggtgggactcctttccacaagactggcaagtgtcggtatcacggcagaggtaggcggctatgcacagctgtggggctatctctactacgaactgaagtacaccgcatcgaacggcagaacgacaagagccatgggagcgatgtatctggagcttggcatctatctgaagatcaaattcctggcacaggcgctggcgaactcctttacctataatccgaccttgtatgaaaatgaatggccgctgtacacggtgggacatctggaaaatgttctggactttgcctatacacaggcggatgtcaaagacatcaagatgaagcgggatgtgaaagcggtacagctgtcggatgaatatttccggatgcaatatatggatatgaaagaaggactggatgatgacggaaattaccgggagaaaatctacgatgacagcacaaaatactttaacatcgtcatgaccaatccggcattctcctatgaccgggacaccaatgtgatctccgtggatccgggaacagaaccggaacaggacggcgagatgatcattacctggaaaaatcaggaaggaaccttcaatacacagccactgaccataaagattcggttacactgggataacctgcgggatggctattatattgcctttgacagccaaggcggctcctatgtggataccatcatgggcaaatacaattccgatattgaaaaaccggaagatccggtgagaacgggttaccggtttgcgggatggtacgaagatgaagaactgacaacaccatatacgatccctgcgaagatgccgaacaaagagcgaatggtttatgcaaaatgggaagcagaagatgtgggctatcaggttgttgaatatctggaaggaaccaacggtgtctatgaggcacaggatccgatcagttacagcggactgaccgacacggaagtgacaccgaaacctgtagaacacgaaggatacgaaacaccgaaggaaaagaccgagacggtacgggcagacggaacaaccgtggtcaaatattattatccacgggaagagtaccatcttaccttcctgatggaagaaaacggagagacggtcgcaagtgatgactatcgctatggaacattcctgacggctccggcagtgtatcggccgggatatgaattccagggctggtccccggaagtaccggagagtgtgccggcaggagatatgacctataccgcaacatggaaagcttccgacggtatcccgtacgcagtgaggtactacatggaagaaccggaagaaggcggatataccttaagtgagatcaaaaccatgaccggaaccaccggtaagacggtcaccgcgccggagggggattacagttctgtggtctaccaccggaaaggcaatcttgccagcggtgaagtaaaagcagacggaagtctggtgctgaaggtttattatgatctgaacacctatacactgacgtacgatccgaaaggtggaacgttagacgaaacgaccctgacagcaagaccgggagagagaatcggcgttccgataccggtgaaagaagggtatacctttgagggctggtatctggatgaagagtatcagcagtcctttggcgagacgatgccggatcacgatcttacggtttatgcaaaatgggaacagcagacggtcaattatacggtaagacattaccaggaaaaactctggagcattaccggaaatgaagagattccttataaacgggaatttgatgcgaaaaactatgaactgacagaggaagaatcctttgctgcacatgcaggagacagcgtaacgccggaagtgaaatcgtataccggatttactgcaccggaaaaacagacggtggaagttcttggtgacggaagccttgtggtaaattattattacacaagaaataccggtctgctccttctggaagtgactggaaatcccggcggaaaagaatttgcccgggttcagtatgtaccatatggcacgccgatcggcgagatagaagctgtagtaaacaaacagaacgatcgggcaggatatactttcgaaggctggtatacagacggaaaccatcagaatccttttgacggtatcatgccggcagtggatgtgaacacagaggaaccggatgcctggaacgatggttttaaaatttatggaaaatggaccccggttccgagtgagtaccgcgtggaacattaccagcagaatccatttgatccgagttcgtatatcctggtggaagaagagacaaagacagccctgacggataccgaggtgacaccggaagtgaaatcttatccgggattccagtctccggaagcgaagaccttatggatgaccggctacgatgtggcatgcatgcagtactactatgacagaaacagctatccggttacttatgtgaaaaataacggggaagccgatgagacagcagatgtgatgtatggagcagttatttcggaggttccgaaatactccggacatgcatttgccggctggtatgaagacgcagccctgacggtttcctttgaaggaaaaaccatgccgatgcatgcactgaccctgtatgcgaagtgggaacctggaaagaagacttatcaggtggttcatcagttacagagtgcagacggatcggatacctgggagacggcagagacagaaacctttaccggaacagccggagattcggtggaaccggaagtaaaggcgtatgctggatttgccgcaccggaaaaacaaagctgtacgctgaccgtttccgatgatccggataccatcacctaccgctatcggcgtaattcctatcaggtaaccatggtgacaaataacggagatccggcgaccgaaaagacatacctttacggaacccgggtggaagagataccgaagcgggaaggctattccttcgatggctggtatcaggatgcaggtcttacgaaagtatttgacggaacagttccggcccaaaacagtacgatttacgcaaaatgggaaccgagagcaacgtattactgggtaaaatacagcctgcagaacgcaaacgatgacggctatacggttgcatccatggaatctctgttaggcaggacggaagatgtggtgacaccggaagtacgcaagttcgaaggatacgtatctccacagccacagaccggacagatcgaaggcggaaaggttctggtgatcgagtatctgtatgaacgtgaagtacataccttacagctggaaaataatgacggaacggaaccaaaacagctgcagatgaaacagggtgcagcgattccggcaccatccctgcggaaagggtataccttcctgggctggtatacagacagcaccttgcagaccgcgtataccggaaacatgccgaaggaagatctgacgctgtatgcaaactgggaagcaaatacaagaacctacacagtaaaacattatctgcaaaaagcagagggggacggttaccagtgggtgacaacacagaacccgaagggcaagacggatgaaacggtaacgccaccggtcaatacaacctatggcgatgaatatgaattaccggaaccgcagaccgtaaccatttctgcccaagagcagactgtggtaacctactattacaaacgcaaagtacacaaactgacctttgaaccggaaaacggagagaaggcacagattgtggaaggtcgtgtcggtgccacactcaatgtgaaacagccggttcgaaaaggatacaccttcacaggctggacaccggaacttccggagaagatcccgaatgaggatgtaacctatcaggcacagtggaggaagaacagctatctggtgcagtttgtgagtgagggaacggtactcaaggaatatacactttcttatggggatgcgatcccggctcaggaggaaccgaccagagaaggatatacgttcgtaagctgggataaaaacgtaccggataccgtatccgatgaaaatgtgaaaaacggaaaactggtctttaaggcagtatggaaagaaatagcatataccatcagctataatctggcaggaggaagccttccgaccggaaagaccaatccgacaacattcaccatcaacagcaaaccgatggatctggtacagccaaaacgggaaggctatacgtttgaaggatggtcaggaaccgatatcaaagaaaaagatacacaggttacggttaccgcccgcccgttgaaagacagaacctatacggcaaactggaaagaaaattcctatacgatcgttttcaatgtagaaggtgaagtaacaaggggagagatgaaaaatatcccgcttcgttatacacaggaaaccacgataccggaaaacggatatgtgtgcggaggctataagtttgtcggatggagaaccggtggaaagaaaagtgagcaaaaagtatatcagccgggagacaaagtcagcagactttgtgcgaccaataatggaacggtcaacctgtacccgatctgggaaccgtgcgaatatacgattacgtttgactatcagaccggtaataaacgggagaaagtaacatgcaaatataaagaaacatatacgttcccgaccgtaaacagactcggatggaccttcgaaggctggagccggtccgcgggttcgacaaatgtgatcagctatgcaccgaatgttaaaacggctgtgtttgaggatgaaaaggatcttactttatatgcggtatacaaaccgataacttcagctgtttttacgggacagacggaacacaaatactttatcacggatgaacatgaactgactatttttactttctttattcagggggacagaaaggtcgtaacaaccggtgattatggacttgatcgatcctggtataatttgtatctgccggatatctccatggatgcagcacgcctgtaccagaagatgaagataaaagtcagctataagattgataagaaagaagatggatgggcagatctgagattaagttatcagttacaggatggcacatattatgacaacgcagaaaaacgggtaaatgatattggaaaatgtgatggagaaacggtatcgcatacatttgaaattacccgtaaaaatggattggatttaaattatttcatgttggtatttgatgcacatggtaaacacgcagatgaatactacatgagcaatctgaaagtagaagtggatctggaatgatgcgtaagggggaagaagattgaaagacaacagaagaaagataggaatcggaatcgccgtgtgcgcatgcatcctgctgatcggagccggtctgtatcttacgagaaacaacaaacaggaaacacaggaatccccggattcggcctttgtgccggatctggatcctgacgcttccacgcaggaggcaaaggagagtgatccgccggagggcatccgtatcccgggatatccgtcgatcaccattccggcagatacgaaagatgtaacggtaaatttgatgaatccggaaggaaatccgtgttattttacctttacactggtactgaaagatacagatgagacgatctatcagtccaaaatggtagaaccgggaaaagcgatcacgcagatcacactgtccaaagaactgtccgccggggaatatcctgcgatactgaagatcagtactgcggcaatggatgacggtcgggcgatgaacggtgccaatgtggaaaccgtattgaaagtacagtaaggggggagaaacatgaagaaaaaaagagcagttgcaggagggttactgcttgtcttagggatcgcacagagcgtatcagcaggaaccacgaccgtaacgtatcatgtggatccgtcctatatggtgctggttccggcaaacaccacgattccatttaacgaagaatcggtaaactacgggaaaatccgtatcgaagaagcacagatcgaagaaggaaaatgcatccaggtggagctgatctcggacaagaaactgaaaaatcagagtggaaaagaaggggagatcccctatgagattctggcggacacgacagcatttacaaaagcccgttatactacggcaggggaagagacggtgcttggtatcacgatcgacagagaatcctggaaaaaggcaccgtcaggctcctatgcggatacggttacttttcagatatcctatgtggatgcgacagattagagcaggaggatggacagatgaaaaaggcagcaattattctgatggggatttgcctgtgcctctccatacccgttgcggcagaggctgcgcagacaggtacttcgtccgttacgcagcaaagcaccatcaacacgacagtaccggatacccatatggtcacgatacgatccgaacatgcacaggtgagctatcagcatgaggagggtgacgatgaggaaacacaggagacggtgacttacgcggtggagcgcttttccagcccgcagtttcagatccagccgaaaaaaggatggaagatcacagcagtgctggtaaacggagaggatgtgacggatcagctgaaagacgggatgctgacacttccggaagtctatgaagatcagttacttgtcgtggagacggaagacgacaaaaaagatgataaaaaagacgattccaccggaggcggtgagcaggaagataaaaaacctgcggacacaaaacctacagataaaaagccaaccgatacaaaaaatagcggaacttccggcagcagcaattccgggacgaaaacggatgtatcaacgggaaacagtcagggaacaaaggcggatctgacaggcacgacgaatggaacggcagcggcaaagacggcagatatgcaaaagaatgtaacgtattttgtggcggcaattgtatccggtgcggtacttttgattctggcagacaaccggagaaaaagaaaacacggagaatagataagcagacagaaagaaaagcgaaaaagggcagatgaaccacaaaatcggtttacctgccctttttcgggcggatcaattttgattatcggggcagtcgccagggtctcatgtgagtatgcacgttggcttgttactcgtgtaaatcaggaacggtctgctccgccggtgtgtaccacccgtttttccaccagactgaccgcctgatagagaatcatggcgatgatgcacaggagaatgatcgacaggatcatccagtcaagcttgaagatctgactgctgtagataatgagaaatcccagtccctgcctggctccgatgaattcaccgatgacaacaccaaccagacagagcccgatattgactttcataacgctcagaagataagggaccgaagagggcagtgccacacgcagaagttcatctttacgttttccaccgagggtacggatgagcttcagagaatcaggatcaatttccgtaaagctggtatacagattcaggatggagccgaagatcgcaacggagatcccggcaaggatgatcgtcttataatttgcaccgagccatacgatcagcagaggagccagtgccgacttcggaaggctgttcaaaaccacaaggtaaggctccaggatcgcagcaagccggggacagagccagagaaggacggagaaaaagagactgaaacctacgacaagaaagaaactggcaagtgtctcgaacacggtgatcccgatatgtgagagcagatggtttgtcagaagcaaggtccggaaagcaagacatacctgaccggggcttccgaagataaaggaatcgatgaacccgagccgtgcactgacctcccagagtagcagaaaaaccagaaagacagccagccgcatcaggcggataaactgctgtctttttttgtgttttcgtaaaaaagactgttgtgcagatgaatcaggtatcatgatttaactccttccagatctgttgaaaatattgcttgaattcgggggcatttcgcatctgcatgggagtgcggtcggcaatggtggtgagaatggggaactcgcaccggacgcaggcaggggctttcgagaggatgatgacccgatcagacatgctgatggcttcggagatatcgtgggtgaccaaaagcgcggttttcccttctttacgcaggatcttccagatgtcatcactgacggaaagtctggtctgataatccagtgcactgaaaggttcatcgagaagcaaaagtgcgggttccagggcaagggtgcggatcagtgcggcccgttgtcgcatcccgccggaaagctgggaagggtgggagaaacggaagttccagagcccatactcctgtaagagacggtcaacgtgtgagagggattcttttgttttccttttttgaatttcaagaccaagaaggacattttcatagatggtcagccattcgaaaagatgatccttctgcagcatatatccgacagagagaacagaatgttcccgtggaagtccctgcatggtgatctgtccctgttccggtatcagaagtccggctatcagattcaggacggtactttttccgcatccgctgggtcccaccagagagacaaactcgccttcctgaacggaaaaactgatttgtgagagtgcctggatctctccggagagtgtgtgatacgaaagtccgacatggtcaagttccaataaagcaggcatagaaaaaacctccgtgtcctggaattatgtattcccacagtaacaggcaaaatgcactaaaagcagaaaaaataagagtcagggaatacactatagtttattatatgaaaaagacaacgaatggttatatattaagatttgcttacgaaagtgtaagatttccgaaaatcggttgtgacgatggtgaaaactgttataataaagtcctgtaaagtcccggagaaaggaaaagaatatgacaatatggaataaaataaggaccggtcagtggatttcacggacttatctgctgatgctggtgtttaatctgctgtataattcgctgatctattatagtggtcagtggatgggaactcatacgaaagcctggaatatcgaaatatctttggacaatcagattccggtaatcccctggtttgtgggaatctatttttcgtttttcctgttctgtgcagttaattttctgctgatgggttattatgggaagaaagaagcctgtctgtttttatgtgcagagcttctggccaagacagtatgcgggatcttttacctgtgttttccgacaacgaatcttcggccggagatcgtgggaacggacttctggagtcggatgcttgtggaattgtatcagatggatgcagcagtgaacctgtttccgtcgattcactgtatggacagctggttttgcgtggtggtacttcggaatatccggaaagtaccgggctggtatatgacgatcacctggatctgggctgcggcaatctgtgcatccacgttatttacaaaacagcacgggattctggatgtggcagcagggatagcacttgcggaactcagctatatatgtgtgatccgctggaaaaaaacagaacggttccgtctgtggatggagaaaaaacggatatgaaaaataagaaaaaaatcataggaaacggtattttcctgtttctggtgcttggtcttactctgtatggtgtctttcatggagaagatctgggactgatctgggaaaatgtcaaaaaagcggataatcgctatctcttcccggcagtcatctgtgtgatattttttatctggggagagtcgattattatacattatctgctgtatactctgcagatcaggctgaaaaagtggaagtgttttctgatctcttcggtaggcttctttttcagctgtattacaccatcggcaagtggcgggcagccgatgcagatggtatatctgaaaaaagaaaagattccgatctcggtatcctccgtagtactgatgatcgtaaccattacatacaaactggtactggtgatgcttggattatttgtactgttctttcagccgcggatcacagatacctatatgcagaatgtgatgccggtgatgtggctgggactgtggctgaatgtattctgtgtgacatttatgctgcttctgacttttcatccgcagctgatgcggcagattctggtaaaaggacatgaagttcttgtaaaaatgcatatcctgaaaaagaagacctcccgtctggaaaaactggaaggagccatggacgagtatcagaagacagcagaatatctgaaaaatcatccgggcgtggtaggcatcgtgtttctgatcacctgtctgcagcgtgttgcattgttttttgtaacatattttgtttatcgatcttttggtttacatcagtacagtatgtatgatattgtaatacttcagggtatgatttccgtggctgtggatatgctcccgctgcccggaggtatgggaatctcagaaaagctgttttccatgctgtttacagggattttcgggcaggtaaaggttctggcgggactgatcctgagccgtggactgagttattacacagagttattgatcagtgcagtcatgactgtagctgcgcagctgtttcttggtaatgaaaaagaacacagagaaaagatcggcgaaaagctgaaaacgatacaggaaaagggaaaaggatacgaaagaaagagggggaactcatgataagttttattggttattacaattacacggtgattctgacgtatatcagtctgttttgttccattgcggggatgttgtttactgtgaacgggtggtataagatggcagtgttgtgcctggctctttcgggactgtgtgacatgtttgacggaaaaatcgccagaagaaagacagaccgtacggatgatgaaaaatgctttggtattcagatcgattccctgtgtgacatggtctgctttggggcatttccgattctgctggcctacagccttggtatgagaggaccgattggtatcgtgatccttgcatggtacggaatgaatggtgtggtccgtctcggctactttaatgtctgtgagacaaaacgtcaggaagagacggaggaagtgaggaaatattacagcggtctgccgatcacatcgatcgctgtcgtgctgccgctggtgtttgtgctgcatacggtgctgaggaaccattttgcagtggcacttcatgtggctatgtttgttgtcggtacgctgtttgtgacgaatatccaggtgaaaaaacccaggaattccacactggcagtcctggtcggcgttgttgccctggcaatcttaaaaatctttcatattttttagtttttaataatgatgatcaaaagccgaaatgtattacggagtattgcagatgacatacgacaacattttggcttgtgttttatacatgttttttcgaaaagtcaggtacagaataattccgagaacatatatgtaaaagggagagagcatatgaaatacgcagatcgatacggaaatcgctgggaagaaaccggattgcaggatcgttttctggaaaaattatataaaagcgtaccggggcgtgcggtggtaaaagtgctggtacatccgtgggtttccagaatgggtggctggatattgagccagaaagcatcctgctggctgatcccgttattcttaaaaggacatccgatggatgagtccggctgggtcaaacaaagatttacatcttataatgatttctttatgagaaagctgaaaccgggacaacgtccggtggaagaagatacggcgcggatcatcagtccctgtgatgccaaacttaccgtctgtccgatcacggagtacgggatcatgaagatcaagcatacgccgtatacggtaaaagaactgttaaaaagtgaaaaactggctcgtgcctatgaaggcggctatggatttgtttaccgcttgacagtggacgactatcacaggtatatttatacagaaatcggaaaaaaatccggcaactataagatacccggaatcttccatacggttaacccgattgcaaacgatctggagccgatctataaggaaaataccagagagttctgtctgatcaggacaaccgatgcaggaaccgtccttcagatggaggttggtgcactgatggtggggaaaatcgagaatgatcaggaagaagcgtttgtacaccggggagaggaaaagggaagatttgcattcggcggatctacgatcgtggtgctttaccagcggggacaggttcagccggatcaggatcttctggacaacagccgggacggttacgaaacaaaagtaacccagggagaggctgtaggagataaggtgggaaaatgcagaaaataaattatcagaaattaatggaaaatgaaatcgcacacaacaggcaggagcagaaagttcctgccttgcttttacacagctgttgtgcgccgtgcagcagttattgtctggagacattgagtgaggactttgcgatcacggtgttttattataatccgaatatttatccggaagaagaatactggaaacgggtgagagaacaggagcggtttatcggtcttctgcctgcaaaacataaaatctcttttcttgaaggcaactatgaaaaagaacggttttatgagacggtaaaaggcatggagaagatcccggagggcggagagcggtgctttgcgtgttatcgtctgcggctgtcggaggcgatcaaagaggccgagaagggcggatttgattatgtgaccactacactgacgatcagtccgatgaaaaatgcgcagaaattaaatgaaatcggagaagaactgtgccgggaaacaaaagtggcgtggttgccgtcggattttaagaagaaaaacgggtacaaacggtccaccgaactgtcaaaagaatacgggatgtaccggcaggattactgcggatgcgtgttctcgatgcgggagcgtgaagagcaaaaagcccggatcgagcaggaaatcttgcagaataacggaatataaaaagcgacttgcgccgacacaggattaatgatagaatgatttcagactttactatgagaaagtaaatggcagtgaatccgctggttcccggataatttaagagaggaacaggaaaagaagtctgccggaaaatacagggaagagaggaaacaatatggcacagttatggggaggccgttttacaaaagaaacggacaaacttgtatataattttaacgcatccatcggattcgatcagaagtttttccatcaggatgtacagggaagcaaagcacatgtgacgatgcttgcaaaacagggaattctgacagaagatgagaaaaatcagatcatcgccggactggacagtatcgtggcggatgtggatgccggtaaactggagatcaccagtgagtacgaagatatccacagttttgtggaggccaatctgatcgaccggatcggtgacgcaggtaagaaactgcacaccggacgaagcagaaatgatcaggtagcgctggatatgaaactgtatgttagagacgagatcaaagaactggacgaactggtgaagaagctgctggtgacactgaataagatcatggaagaaaacctgcatacctatatgccgggattcacccatctgcagaaagcacagccgatcacactggcacatcatatgggtgcgtattttgagatgttccgcagggacagaggccgtcttgcagacatttacgaaagaatgaactattgtccactgggaagcggagcacttgcaggaaccacctatccgctggatcgtgcctacagtgccgaactgatgggatttgccggtcctacgatgaacagtatggattccgtagcagacagagattatgtgatcgaactgttatctgccatgtccacgatcatgatgcatctgagccgtttttccgaggaaatcatcatctggaactccaacgagtatcagtttgtggagatcgatgatgcctacagtaccggaagcagtatcatgccacagaagaaaaacccggatatcgccgagctggtaagaggaaagaccggccgtgtttatggcgcgctgatgtcgattctgacaaccatgaagggaattccgctggcatataataaagacatgcaggaagacaaggaactgacctttgacgcgattgataccgtaaaagggtgtctggcattgtttgaaggtatggtttccacaatgaagttccgtaaagatgtgatggaaaacagtgcaaaacacggatttaccaatgcaacggatgcagcagattatctggtaaatcatggggtaccgttccgtgatgcacatggcattgtcggccgtctggtgctgtactgcctggacaaaaaaattccgctggacgagatgactctggaagaatacaaagcgatcagtccggtgtttgaagaagatatttacgaagccatcagcataaaaacctgtgtggaaaaacgtatgaccatcggtgctccgggaccggatgccatggcaaaggtggtagagtggaataaaaaatatttggaagaaaagtaaaaaagtgttgcttttttcagaaaactggtatagtattaccaagtaaatacaaatgtacgcgagagaaatacaaaaagttacggttgtgcattgagtaagaagaatgaggagtgaaatcacaatgagcagcaaattaagagtaggtattttaggagcaacaggaatggtaggacagagatttatttctctgctggaaaaccacccatggtttgaagtagtaactgtagcagcatccccgagaagtgcaggaaaaacatatgaagaagccgtaggtggacgctggaaaatggatactccgatgccggaagctgtaaaaaaactggtagttatgaatgtaaatgaagtggaaaaagtagcttccaccgttgattttgtattttcagcagtagatatgtccaaagaggaaatcaaagcgatcgaggaagaatatgcaaaaactgaaacaccggttgtttccaataacagtgctcacagatggacaccggatgtaccgatggtagtgccggagatcaacccggaacactttgaggttatcgaatctcagaaaaaacgtctgggaaccacacgcggattcatcgcagtaaaaccaaactgctccatccagagttatgcaccggttctgactgcatggaaagaattcgagccatacgaagtagttgctactacataccaggcaatctccggagcaggtaaaaccttcaaagactggccggagatggtagaaaacatcatcccatacatcggcggggaagaagagaagagtgaacaggaaccgcttcgtatctggggtaaagtagaaaacggtcagatcgtaaaagccagcgagccggtgatcacctgccagtgtatccgtgttccggtactgaacggacataccgcagcagtctttgtaaaattcagaaagaatcctaccaaagaacagctgatcgaaaaactggtgaacttcaaaggattcccacaggaagcagaacttccgagtgctccgaagcagtttatccagtatctggaagaagacaaccgtccacaggttaagatggatgtcaacttcgaaaacggtatgggaatcagcgtaggtcgtctgagagaggacactgtatacgactggaaattcgtaggtctgtcccataatactgtaagaggagctgccggcggtgctgttctgtgtgcagagactctgaaagcaaaaggatatattcaggcaaaataaataagaatgcaaataagaaaaataaaatcccgggtgtgttgtgtgcccgggattttttactttacaggaaattgctttcctgtaagtaaaaaacactccgcgagaacgcgcgaatttatgcgatcagcatagattctgtgcatcgcgtagcgtgttgctgggcacggaacgaacagtaacgatttcaatatagaaaccaggcaagttccggagtgtacttgaatttccggaagaaaaacgttatactctttgttgcccctgtgaggtttttatatcgcagggacgctgaagagacgagaaagggttaaatttatatgaataaatccgtatttatcgcagagaaaccaagcgtagcccaggaatttgccaaagcgttaaaggtgaagaccacgcggcatgacggatatctggaatcggaaaataccattgtcacctggtgtgtgggtcatctggtgacgatgagttatccggaagcctatgatatcaagtacaagcgctggactctggaaactctgccttttctgcccggggagttcaagtatgaagtcatcccatcggtaaaaaagcagtttgagattgtcaagggactgttaaaccgcccggatgtggacaccatctatgtctgtaccgactcaggaagagagggagagtatatctaccgtctggtggcgcagatggccggtgtcaggggaaagaaagagaaacgtgtctggatcgattcccagacggaagaggagatcatccgcggaatcaaagaagcgaaggatctgagtgcttatgataatctgagtgcatcggcatatctgcgggcgaaagaagactatctgatgggtattaacttttccaggatcctgacactgcggtatggaaacagcgtgtccaactatctgggaaataaatatcaggtgatttccgtgggacgggtcatgacctgtgtacttggaatggtagtgcgaagagagcgggagatccgtgaattcgtaaaaacaccgttttaccgggtgcttggaaaattcttgctggaaggaagaaccttcgacggagaatggcgtgctgtggaaggcagccggtattttcagtcaccggatctgtataaggaaaatggtttcaaggacagaaaccgggcggaagaactgaaaggctttctggaacgggagagtgcagtcagtgtgacgaatgaactttcccgttccaacggaatggcacagcagacagctccggtgcatcaggcggtgcttgagaagatcgagaagaaaaaagagaagaagaacccaccgcttttgtataatctggcagaattgcagaatgactgttcccggatgttcaagatcagtccggacgagacactgcgggtggtgcaggaactgtatgaaaagaagctggtgacatatccaagaacggatgcccgtgtgctttccactgcagttgccaaggagataagccgaaacctgaagggtttaacgagataccagatggcagcaccgtttgcacaggagatcctggaggcgggaagttttcaagggatcgaaaagaccagatatgtcaatgacaagcagatcacagaccattatgcgattattcctaccggtcagggactgcagaatcttggcagactgctgcagatttcacagaaagtgtatcaggtgatcgttcgccggtttttgagtgtgttttatccggcggcggtgtatcagaaggtgagcctggtgtcggcggtcggaaaagagaagctgttttcgagtttcaaggtactggtggaggaagggtatctgaaagtggccaacgtaccatccggaaagaaagaagaggatgcgaaaaatgcagaggagaaaacggatgatatccagtgtgatgctgcctttcttgcctgcctgcaaaagctgaaaaagggcgccattcttccggtcgatggatatgagatcaaagagggagaaacttctccgccgaaacggtacaattccggtacgatgatcctggcgatggagaatgccggacaactgatcgaggatgaggagctgcgtgcgcagatcaagggaagtggaatcggaaccagtgcaacgcgagcagagattttaaagaaactggtaaatatcaagtatatcagcctgaataagaaaacacaggtaattaccccgactcagcttggagaaatgatttatgaagtggttaacgcttcgatccgggcactgttaaatccggagcttaccgcgagctgggagaaggggctgaattatgtagccgagggaagtattacttcccgggaatatatggataaactggagcattttatccgggtgaaagtgggtggagtgctgcaggtaaattatcaggcggcgttacgaagccgatacgacagtatcgcagggaattatcgaaaaggaggaaaatgatcatgagtatggaaagtattcgaattgagaacatgtatgatctgaatgagacgattgcagcggagatttttgaagggaagacatatccgtgggaagtacttccgctgattaaagaatttattgtgaagctgggaaatacactggatcctgcagagtatgataagatcggggaagatatctgggtagcgaaatctgctaagattgctcctacggttgcgttaaatggtccgtgtatcatcggaaaggatgccgaggtgcgtcagtgtgcatttatccgtggcagtgcgatcgtcggtgagggtgctgtggttggtaattctacggagcttaagaatgtgatcttgtttaataaggtgcaggtgccgcattataattatgtgggggattctgtgctaggttataaggctcatatgggcgctggatcgatcacttcgaatgtgaagtcggataagaagctggtggttgtgcacggagatggttttgatattgagaccggcatgaagaagtttggggctatgctgggagataatgttgaggttggctgtaattcagtgctgaatccggggacggtgatcggacgggagagtaatgtgtatccgctgtcttcggttagaggggttgtgccggagaggtccatctttaagaaacagggagaagttgttgctaaaagatagatgattgaaaaaggggacgcccccggcggaagcgttctcccgccagcaacgtgggcagggcaactttgaactagccactaactacgactatgttcacttgggtcagctgacccaagcgaaagtctccgtaagtgtcggatttcaaagcttgccctaaccgcccacaaagtgttgctggcaggataacgcttccgccgggggctggtttttcaatgcggaaagagaaaggcgcgtcgagttttgtgttttggcgaaaatagataaaaaccggagcaattgtcgttgggtgataattgctccggtttttttacgccattagttcagaaaacagaagtgaaggatcaaaccgtacagtaaaaggtgtaccgggtagaaaaggtagaaaaaatatttcagggagatgccacgtttcccgttatagaggttgatcgggatgaaggcgaggcaggcgggggcttcccagaggaggctcatgcaggagaccagagtgcagaggaacttctgatcgtggaacaggtagagtaacaggatcaggatgattcctttgtagtcgtagtcggtctgaaggagccaggcggtcagacagccggcggcggcgatcaggatcttgacgatccactgaatgttcgggtttatttctttgtggcttacagtatcgatggcccagatggtcaggagacccaggaataaagtgaaaaagacattctggtaacccggagcaaatggggtgttgaacagtgcataatcaaagggaaattcggacaccagggcaaagaggaacaggcgggtggcatatttctttttgctggaggtgtggaggaatccttcaattaataagaaacagaagaccgggaagccgattcttccgatgaagcgcatgatctgataaatgttccaccaggggatcgtcatagagacagggtgtcccaggaaggacggattttgctgcatcaggatgccgtagacgatgatgcttgcggcgaaatggtcgatggccatggcgataatggcgatgatttttaaagtactgccggacaggcagccctttttcagggaaaactgggtcatagaaaacctcctgttttttgataatctgagtttttcgatattccttcttaatgttgacagataaagaaaaacagcgtcagaaaaagcataaaacgcaaattgtgacggaatcctgcggaatattctgaaaaaagtataccagtcctgcaaaaaatgtcaacgaaagggaaaaaaataaaaaaaaagcaagtttgtctggactaaccgcatgggtgtatgcgaaaataactatgataagcgggtgagtaggttcacttgcttgagatacataagtctcgaaaaaagtatttcaagtttgaaaggagtcttaacatgatttattcacaagaagtagaaatgatgtgtccggtttcacagggcgttaatcacggcgctgcaccaatcccggaagaagcaaaatgggtacagtccaaagaaattaaagatatttccggtctgacacatggtgtgggctggtgtgcaccacagcagggtgcctgcaaactgacactgaacgtaaaagatggtattattcaggaagctctggtagagacaatcggatgttccggtatgactcattccgcagctatggcatctgaaatccttcctggaagaactcttctggaggctctgaacactgacctggtatgcgatgctatcaacacagctatgagagaactcttcctgcagatcgtttatggtcgtacacagtccgcattctctgaagagggtctgccgatcggcgctggtctggaagatctgggtaaaggtctgagatctcaggttggtaccatgtacggaacactgaaaaaaggtcctcgttatctggaaatggcagaaggttatgttaccggtattgcactggatgaagaaggatgcatcattggttaccagttcgtaagtctgggcaaaatgactgatttcatcaaacagggtgatgatcctacaacagcttgggaaaaagctaaaggacagtacggtcgtgttgcagatgcagctaaaatcattgatccgcgtaaagaataattactgttctgcttaccgtcaatataataggaggataaaataaatggctttatttgaatcatatgaaagaagaattgataaaatcaatgctgtcctgaacagctatggaatcgcttctctggaagaagcagagaaaatcacaaaagatgctggtctggacgtatacaatcagatcaaaggcatccagccaatctgttttgagaacgcttgctgggcatacatcacaggtgcagcaatcgcaatcaaaaaaggctgtacaaaagcttctgaagcagcagcagctatcggcgaaggtctgcaggctttctgtattccgggatctgtagcagatcagcgtaaagtaggtctgggacatggtaacctgggtaagatgcttctggaagaagatacagaatgttttgcattcctggcaggtcatgagtctttcgcagcagctgaaggtgctattggtatcgctgagaaagcaaacaaagtacgtcagaaacctctgcgtgttatcctgaacggtcttggaaaagatgctgctcagatcatcgctcgtatcaacggatttacatttgttgaaacagaatatgattactatacaggagaactgaaagaagtattccgtaaagcatactctgaaggtcctcgtgcaaaagttaactgctacggcgctaacgacgttcgtgaaggtgtagctatcatgtggaaagaagacgttgacgtttctatcacaggtaactctaccaacccgacacgtttccagcatccggtagctggtacttacaaaaaagaacgtatcgaagctggtaagaaatacttctccgtagcttccggtggtggtacaggacgtactctgcatccggataacatggcagcaggtcctgcttcctatggtatgacagatactctgggacgtatgcattccgatgcacagttcgcaggttcttcttctgttccggctcacgtagaaatgatgggtctgatcggtgcaggtaacaacccgatggttggtatgactgtagctgttgcagttagcatcgaggaagctcacaaagctggtaaattctaagaaacccttataaaataggcgttttaacaagtgttcaaacgagaaaagaaagccgcaggtttcgtgcctgcggctttttctatcatcaaatatctgaaaactgactgatttgataaaagaaaaattgtcagaaaaccgattgactctataacgattataaggtttaatatagattagaaagaaactttgccgagggaaagcgtcagagtgataaaggagtagaaacatggaaagagatcttacatcgggaagtgtgtggaaaaatattgtgtatttctcacttccctatctgttgtcttattttttacagacattatatggtctggcggatttgtttattgtcgggcagtttgacggtgtggcgagcacgacggcggtatcgatcggcagtcaggcgatgcatatgctgacggtgatgatcgtaggcctggcgatgggcacgacagtgaatatcggacgggcagtgggtgcgcgggataccaaaaaggcgtctaaagtagtgggaaatactatggtactttttataggtgtctcagtggtgcttgccgtggttttgctgttactggtgcgtccgatcgtgaatgtaatgtctacaccggcggaagcggtagaaggaacagttcgttatcttaccatctgctttatcggaatcccgtttatcacggcttataatgtgatcgcatcgatcttccgtggtcttggagattccaaaagtccgatgtactttattgcaattgcctgtgtggcaaatattgcgttggattacatatttatcggtgcgtttcatatgggaccggaaggtgcggcactgggaaccacgctttcccagacaatcagtgtggttgtatcgctctgggtgatcttaaaaaagcagacaggaatctctgtaaaaagagaagattttcgaccggatcgtgtaacgatggggcaggtgctgaaaatcggtatcccgatcgcagcacaggatggatttatccaggtagcgtttatcatcattacgattatcgcgaaccgcaggggactgagtgctgcagcagcagtgggaatcgtggaaaaaatcatcagttttctgttcctggtgccatcttcgatgctctctaccgtgtctgcgctgggagcacagaatatgggagccggcaaatacgaacgggccgatcagattctccggtatgcgatgggaattgcggttggtttcggacttttcgtctcactgttgatccaggtgaccgcagaaacggcggttggtctgtttacgacagatgcggtggtcatcctgctgggagcacagtatatccgtggatacatctgggactgcattttcgcaggagtacatttcagtttcagtggatatttctgtgcgtatggaagatcagagatctcgtttatccacaacctgatcgcgattctctgtgttcggattccgggcgtatatctgacttcaaagatctttccggatactctgtttccgatgggactggctacggcaacaggatctctgctgtcggtgatcatctgtatgatcgcatttgactggctgaaaaaacagaaaagaaaaagcgactgacgttgtttgacatttccgtaaagcagtgctatgatatgtaagaattaaagaacgggagcttgtgtgacaggctgagaggaagatagatcttcgaccgcacctgatttgggtaatgccaacggaggaaatacatatcgagagagtgtacatctgtccgtgttggtgcggacagatgtttttgtatactgcaaaaatttttatgacaaataacatataaaaatatgcagaagtacatgctcggctatctttggctttccgatctttacaagtaataagagactgtacttgcaggcattttgcgaaaaacgttcggacgacacagacagtgtgtgaacagggcagatgcaggtgaatctgagggggagcgccctgagatccggcatacagaaaaaagcgatgggaatccgtgtttcggagtgagaggaagtaatagaacttcgaccgaaaatagaggggaactgcgcttttttctgctcaagaaagaaaaaagacggttttcccggaaaacaagagaggaaaacaaaaatggaaaaacaaagactgaacacatttcgcatggtaatgctggctatgatggtagcaattggtgtggtgatctccccgatccttcgtatcgagggaatgtgcccgacagcgcatctgattaatattgtatgctcggtgctgatgggaccgtggtactccctgctttgtgcaacgatgatcggtgtgatccgtatgttatttatgggaattccgccacttgcactgaccggggctgtatttggtgcatttttatcaggtgttttttaccgcttatccggcggcaagatcatctgtgcggtactgggagaaatctttggaaccggtatcatcggatcactggtttcttacccggtgatggcctttatcatgggaagagacgggttgaatgcatttttctacactccgatgtttatctcagcaacgatcatgggtggcgcagcagcatatatgttcctgaaagcactgagcaaagcaggactgctggcaaaatttcagagaagtcttggagcaaaagtttatgataaaacagttagaaaatcagctgaagagcgtgcgtgatgcaacaaagagagaacaaccactgattcactgcatcacgaatccgatttccatccacggatgtgcgaatatgatccttgcggtgggcgcaaggccgatgatggcagagcatccgatggaggtggaaggtatcacaaagacagcgggagcactgatgctgaatctcggaaatattaccgatgcgcggatcgagtccatgaagcgttccgcgcggacggcggcgaaagaagaaattccggttctgctggatctggtaggcgtatcctgcagtaagattcggatggaacttgccatggaactgatcgaaaagggaaagatacagattctgaaggggaatatttccgaactgcttgcaatcgccggacagccgtttcacggaacaggtattgatgccggagcggaggatgcgatgaccggggacaatgaggaagagagaaaagaaatcttccgaaaagtttcgaaaaagactggaagtgtacttctggctaccggagcaaaagatcttctggtggatcagaaccggtgtctgattctggaaaatggtgtgccggagctgtccgggatcacaggaaccggatgtatggtcggtgcactttcggcggctttcctggcgcagagagatccgtttgtggcggcattgcttgggacttcggtgatgggaatcgccggggagatcgccgcaaaaaggtcaacaggaccgggaagttttcagatggaacttctggatgcggtggcagggctgacacaggaagaactggaggcaaggatccggattcgggagattggaatataaagtggtcttagagtcacccgaatcgttcatgcaaagaatatgggaagccatgatcacaaagtgaaagaaagctcatgcgtctgttatcataggtggtatgctgactgacgggtgaaatgatgaaagtaaaatttcaggaaggaaaaaacaggtatgaaaacagatttggatatgacgttatatctggtgacggacagcacctatcatacagaggaaactttttacaaaacgatcgaagaggcatgccagggaggtgtaacactggtgcagctgcgggagaaaaactgcggcggacgggaatatctggagaaagcaatgaaggtaaaggcaatcaccgaccgctatcagattccactgatcatcgatgatcgtgtggatgtggcaatcgcctgtgatgccgccggtgtccatgtgggttcctcagatcttccggtagccgtggcgagaaaattgctcggtccggacaagatcgtgggtgctacggcaaaaaccgtggaagcggcgaaaaaggcgtatgaggacggtgcggattatctgggggtgggagcaattttcccgacaacgacaaaggtagtcacgatccgtacttccgtggaaacactgaatgagatctgccagagtgtaccgattcctgcagtggcgatcggcggcttgaatgatggaaatatggacatcctcaaaggcggtaagatggcaggtgtggctgtcgtttccgccattatgaaagcggaagacccgaaggcagcagcggcacggatgaaagagcatgtgggtgagctgcggggataagatgtaaggtcctgaatatatggataaaaaagagaagttgttgcaaagcagggaagttatatagaagtgttttgcagcgactttttctgattttgggaaacagataagggaaaaacgaaattccctcttgaaaatcataataaccttgtggtaaactaggtatataggaaatatggaggttatagcatgaaaatatcgacaagagggcgttatgcgattcgtgtaatgttggatctggcagaacataatacgggagagtatattccgttgatggatatagcaaaaaggcaggagatttccgagaagtatctggaggctatcgtggcttcactgagcaagaacggatttgtgcgttcgctgagaggaaagggaggcggttatcagctattgaaggatccgtcagaatatacgattggaagtattcttcggttgacagaggggtctctggcaccgatagcctgtctggaacatgagccgaatcaatgtgagagagtctctgtctgcaagaccctgaaaatgtgggagggggcatacaaggtgatcacggagtatttcgatgggattacgattgcagatttactggcggatactacggatgtggggaactacattatttaaaatatgagagtgttggctaatggggacgcagccgtcccttgcttcgctcctgctggcaacgtgggcaggggaactttgaactagccgctaacttcgactaaattcacgagggtcggctgaccctcgcgaaagtctacgtaagcgtcggatttcaaagcttcccctaagcgcccacacagtgttgcctgcaggagcgaagcaaggggcggctgctgtgcgttagccaaagggggaggaggtgtagagtggtgttgtacggtatgaataataagaaaaaagatactggatgaaaaaagagaattaggaatttgtttgaatgtgaaaatttcgcaaaatgtgataaaaatcgtggttgatttttgggagaaagggactataataataggtatggaagcatagctcagctgggatgagcgttcgcctcacacgcgagaggtcaggggttcgagcccccttgcttccattttttgttgcaagaatataagtaatcaagtgctttttgggatgacagatagaatagaaatgcctcacaggattatgtattgatatgtaatataacaaaaaggttggtatactatgtagttttacggtagtatatcaaccttttttaggttaatatagatttatttgttcaaaacttctttcaacgcatccagcacttcctgtaccttttcgatataggcgttttcacccatatgaccgatgcggatcagttttcctgcgaagcagccgaaggagccggctaagaggatgttgtgatcgtagcgcatcttgtgaaggatttcttccgcggtgtggccttccggtacttcgaaagcggttacggtgttggagtaaccacatgccgggtagagctgtaagcccatggaagtgatggcttcgcgggtgtaggctgctactttggcgtgacgttccagaatctgtggatcggctttaatgttttccagagcagtacgaagtccgtaaatgtcgctggccggcatggtgtatgggaaccatttggcttcatagtagcctttgaaggtcagcagattcgcataaaaagatgcaatcggtgttttacgcttttccatggctgctttcgcgtctgcactcaacgttaccattgtcagtcccggaggtgcggacacagctttctgggaaccaccgcataacaggtcgatcttccagtcatccacacggacatcttcgccgaacattcctgctacggaatcaacaactgtgaggattccgtaggactttaataacggacagatggaagcgatatcatttaacataccacttggcgtgtcacagtgaacaacagttgcatatttgaaatcatggtctttttccagataagctttcagatcattcacatcgaagggatgggaataatcgcaggtgtaaagaacaggtgtgccaccgtagatggagacaaaatctttgaatccttctccgaatactccattatccagaaccagaacccggtcgcccggttcagtcagggaggcacaggcagcttccagaccgaggataccttccccgccaagaatcagggattcgttttcggtatgcagcagactgctgtagagtttacaggtgtcatggtaatattccacaaagtcacagtccagatctggattctgaaactgtctgctccttgccagcagaatattttcgcggacctgagaaggaccgggagtcatcattttgtacataagcccatcctttctgccagtttctgtaactgaccggagataatcagaacaactacagcggcaactcctacctgcagcaggttgcccgggatagaagaggccggagtgatccagttaccgtaaatgataccttctgcgatgtagtatccggcaattttgatcccgcatgcaaccaggattgcaaccactttccagccaaagccttttttcttctctgtgattgcaccaacggagaagcccatcagaccaacgataatgaaagtgaatggggcccatgcagtccagccggagaacaggtcaaagagtcccataccgaaggcaccgctgagtgcaccggttttcttgccgaagatgatagcagcaaggaataatggaacattgccaaggtggatcagtccaccgtttggtgcaaacggtaaacggatattaacaactgctgtaaaaatataagtcagtgcgatgcacatggcggttaccacaatcgcctgagtattgtttcttgcctgcgttctggtgccggctgtctgattgaaagatgccattttaattccctctttcttcttattaatataatttgtaactgttcagtaccttcacagttacgagctaaaatgcatttaaacgataaaaacacgctttgcgagtttttatcgttatcgcggcactcctcaaggttccgtgcaagcacggactttgactcgttgctcgcgtaaatcaccttcggtgatggcattttggtttgtatgtctcgggattttgacatattcatgtcaaaacacctcgcgggacagtagctactgaatagttactataattttaatatcacactgaatcataaaggataactggtcagatagaaataaccagttttgaaaaaaataaccagtccagtttgaaagaaaaagaaatattataaaggaaacatactgcgcgaatctatgtgatcaggataaattttgtgtaccgagaagcgtgttacagggaacggagtaaacagtaaagagatcaggatcgaatgtaaactacaataaacacaaggttgacaatacgaaaaacaggtgatatagtagtattagcatagcggtggatattttctcggcgcagatgcagcaaaattatggaggatatgaaaaaatgacaacgacaacaatgagcagaggcaagacttatgacatggtgtacattgcggtatttgctgtggtaatggcgatttgttcctggatttccataccggcaaccgttccgtttacattacagaccttcggtgtgttcctggcagttggagtactcggtggtaagagaggtaccctttcaattctggtgtacattcttcttggagcagttggcgttccggtatttgccggatttagtggtggaatcggcagtctgtttggcaacgccggtggctacataataggtttcctggtgggtgctctggttatgtggggcatggaaaaagtaatgggaagaaaaacatgggcactggcagtccagatggtagttggtctgattgtgtgttatgcatttggaactgcctggtttatgattatgtacaccagaagtgcaggaccggttggtctcgtgactgtacttggctggtgtgtattcccattcattattccggatctgatcaagatcgtggtagcactgggactgacaaagagtctgaaaaaagtacttcctattatgcagtagccataggatatccagaagaagagatctgtaagacgcctggccctcccggacttacaggtctctttttgcgttgctccacgtatggaagttgtctggcttagatgataataattatcataatatgataaaaaatagggtaaaaaatgtgaaaaattgccaatagaaccttgcgaagaaaaaaagagagttatataataaaaataatcatatttatatatgtgtaattataaaatgtaatgaatgagcaaggaggtaacacatgcataaatggaaaaaactggttgcaggagttttatcagccagtatgattataccggcagcaccattgactgcgggagcaacagaacagatagaactggtgcagcaggcagaagcaactccggaagcgcaagcagcaccggtagcagaagttccggcttcggaacagacggcagcaccgacggagaccccggcgccgacagagcccccagcagtatcggagaatccgacaccaacggagaccccggcaccgacagagaccccggcagccccggagacaccgaccccgacaccgacggagaccccggcaccaacggaaactccggcgccgacagcaacaccaacacgggcaccgatacagccaacaaccccgacgccgacagagactccggcagctgaacagccgacacaggaaacaccggcagcaacaccggcggaaacaccgcagcctacgccggaagctactccgacaccggaagcagaagcacagggaagcaacgaatcactgattgcaggacagcagatagtgattccaccacagatcgaagaggattttcgtctgacaactgttgataaagtatacgcatttgcaagaaaagattgcaggattcttgaagaaaaaagcgatgaggaagatgctgcagctaccggatctttaccgggcggtggtgtctgctatatcttacaggaagacgaagacggatgggtgtttgttgaatccggaagagtcagaggatttatcagaaaagacgaattaaacacaggagaaaaagcggatctgatcatagaagaggcaaaggaattgtccggggaggagaatccggtattcgaaaaagctacaaaactgatgaatccgctgaaaaataaaaatcttctgtatacaaaaacaacagcaggaaaaacagtagtagataaagaatatgcattctgtaacacggataaaataaatatccgtgaagggaaaagcacggatgcacgggtaatcggcacgttatcccagaatcaggtttgttatgtactggcaagtaagaatcaagaatgggtatatgtggaatccggtgatgtgcgtggatttgcaaagagtgaatacctgttgatgggtgaagaagcggaagaaaaagcaaaggcatataccgatgcgggacaggatccggaaactgtatgcggacttgctgatcagatgatcgcaccggaagacaatgccgtctgctattatacgttcaaatcagtgaaagaagcctctgttgagaatccaacccgccaggctctgatcaattatgcattgcagtttatcggtaacccatatgtatggggaggaacagatccggttcacggagcagactgttccggtttcgcacagcatgtatatgcacagttcggtatcggtcttccaagaacatccgcagcacagtcgcagtatggaatgaagattccggtcagtgaagcagcaccgggtgatctgatcttttatgcgaaaaacggtcaggtttaccatgtagttatctatatcggtaatggaagaactgtagaagcggccagcacaagatcaggtatctgcagccatggcgtaaattatgccaatgcggtatgggcaacaagacttctgtcctgaattataaatgataatagtttgacaatttcatgaaatacggttgacaatccgtcaatgtggtgataaattaatgataaagagtataagttttataaaacttatacaatgaatgcatagaatctgattactgacggagaaatgtgggataccacaggggaatcagatttgcaggatgccgaccgtctgggcaacatttgtagagttacaagtgttgcccttttttactttacaagaaattgacttcctgcaaagtaaaaaatgctccgcgaggatgtgccaagacacattctttgttcctttataaaagacaggaaaaagatatccggacggctggtgtaaaaaggaggtgcgtctgcaaaaaagaaattatggggaaatgccaaagagattatgaaaagacggtaatggtttgtggctgaacgattacagataatgaaatgtgatgacaaggaggaaaaagttatgtttcatgaagagtatacggcattatgtaatgcaggggtggcaaaaaataatctgttgaagaaaaatccactgggatattttatttcatccatggtagcaggaatgtttatttcatttggcagtatggtagcgtttgtgctgggacagtcgatggatggaaatggtgcagcggctgcggtaaaactgattcagagtattgcttttgcatcagctctcagtctggttgttatggcaggtgctgaattattcaccggtaacaatctggtgatggcggcagcatccctgagaaagaaagtatcttgggcggatactgtgaaactgtggtgtgtctgctggatcggcaatctgattgcttctttgctctgtgtagcggctttccagctgaccggacttccgacagcaggagatggagcaatcgcagattattttatcaaaatttcttcagcaaaagttagtcttggtgtcggagagatcctggtgcgtgcgatcctgtgtaatattctggtctgtcttgcagtatggtgcggaaccaagatgaaaacggaatccggaaaactgatcatgattttctggtgtattctgatttttatgacctgcggatttgagcatagcatcgcagatatgagcatcatcggaatcggtgtggcaaacggaggaatcactgtcggtcagtatctgtataccgtactgctggcaacagtcggaaatataatcggcggggcagtgtttgtggcagtaccgtatcatgtgatttcaaaagaaaaataaaaaacgaaaaacgcaaagacagccgttcggcagatggatatgaccggacggctgtcttttgagttacgcgaataacaagacaaataaaaaaatttgtgcttttcatgcaaaaaatttatagaaatcgctaataaaactggataatattgtgaatttatggtactcttaataggacgaacttatttatcgggtttttgcggtcttttccaaggatgtgcggaggcggaagagagagtaaagacaggtaattataaggataaaaaatatcaaggaaggtgagcaattggaaaattatacgaagtataagctgaaaagcaaggaagaacttgcatccgtgctggaaggcaaagacaatttgttcgtgattgcctgcaacaaatgtttcaaagagtttgaaacagtggatgaaccggactgcgacgagtttttagcatttgcagcagaacagggaaaaacggttacaggcagtgcaaagtttgatttcttatgtaataagatgcacacagagaaaaaattacaggatctgcttccggaaggaacagagaacgtagttgtaatctcctgtggtcttggtatccagacgattgcagatctgtcaggaaaaccggtggttgcagcaagtaatacgctcaactacagaggtcatcacggtatggcacttaccaaaaagagctgtgacgcatgtgcacagtgctatctgaacgttaccggtggtgtctgtccgatcgttgactgctcgaagagtcttgtcaacggacagtgtggaggagccaagaacggaaagtgtgaagtagacccgaataaagactgtgcatgggaaaaaatctatcagagactggaaaaacagggtcgtctggaagaattcctgcaccagccggtacaggtacgtgacttctccaaagtaaacttcaaagtcatcaacgactatgtgaaagcagccagagaagacagactgaacggatattacggtggcgtacatccgtcagaacgcaaagaattcagtgagcatattgccctgaagaagttcccggatccaaagaccgttgttatttccatgtcccaacatctgggcgctccggcgaacccgatcgttgcagttggggataccgtaaaggttggtcagaagatcggcgaagcagcaggatttatcagtgctccggtacattccagcgtaagcggaaccgtagttgctgtagaacctcgtatgcatggaaccagaggcagcgaagtgatggctgttgttattgaatcggatggtaaaaatactctgcacgaatccgtacagccacataaagatctggacaacctgactccggacgagatcattgatatcatccgcgaagcaggtatcgttggtatgggtggagcaggtttcccgacctgtgtgaaactgaaaccggcgaaaccggtagacaccattcttctgaacggatgtgaatgtgagcctctgctgaccgcagaccacagagtacttctggaatatgcagacgatatcatctatggtttaaaagcaatcctgaaaacaacaggtgctgaaaaaggtattatcgtcattgaagataacaaaccggatgccattgaactgatgcaggaaaaagttgcaaatatcggcaacatggaagtattcgtagcaagaaccaaatacccgcagggcgctgagaaaactctgatcaaacgtgtcatgggcagacaggttccaagcggcggtctcccggcagatgttggcgttgtggtagataatatcagtactgtgaaagcaatttccgatgcgatccggaaaggtatgcctctgatcgagcgtgttgcaaccgtaacaggcgagaagattaaacatccgggcaactttgtcatcaagatcggtaccagcgtaaaagagctgatcgattactgtggcggattcaccgatgatgatgttctggttaagatgggcggaccaatgatgggattcccgttaaaagacctggaagtaccgatgatgaagggctccaacggtatcatcgcgatcgataccgatgaaacaaaagagcaggcctgcatcaagtgcggccgctgcgtagatgtttgtccgatggaactttcaccgctgtattttgtaaaatatgcagatcaggagaactgggaaggaatgagagacatgcacgtcatggattgcgtggaatgtcgctgctgccagtatatctgttcttccaagatctctattattgacagaatcaaagccggaaaaaatgcagtaagggggatgaaataatatgttaattacccagttaaaagacaaagagatgatcaactctctggtggcagggaaaaaagttttcatcatcaactgccatggatgtaaagaagtgcattttccggaaaaagaagctgtagaacttcagaaggaactttccgctgaaggcaatgtaacaggaatcatgactaccgattatatctgtaatccggaaaatatggaattgcgcctgaaaaaacatatggaaaagatccaggcatctgatctggttttagtattttcctgtggcgttggcgtacagacaatcgcagaatatctggatgacaagaaggtatgcgcagcgtgcgatacctatccgcttcctggtttccagggcgtgacaccgttagagtacaaatgtgaccagtgcggtgagtgttatctgaacctgaccggtggaatctgcccgatcacagcatgttccaagagccttgtcaacggacagtgtggcggttccaaaaacggcatgtgtgaagttgataatacgatggaatgtggatgggaacgtatctacagacggctcgaagccattggacgtctggatgtactgaaatgcccgacacagattcacaattttgcaacagacgatgaagtagcaaaataatataagatacataatacgatgcatcgataaaattttaatatgattggagcaatgtataatgaaaatgaaagaattattcgaccgtggtgaatttgtagtttctgcagaagtaggaccgccaaaaggaatccacgtggacgaactggtaaaagaagcaaaaacttatctgaaagatgttcatgcagtcaatgtaaccgataaccagtcttctgttatgcgtctgggctctctggctatgtgtaaagtcctgaaagatgcagggatgaacccgatcttccagcttgcctgtcgtgacagaaaccgtatcgctctggaatctgatcttctgagcgcagcaatgttcggtatcgacaacatcctgtgtctgaccggtgaccataccaagatgggtgaccatccacaggcaaaaccggtatttgacctggattccgtatctctgctgcataccgtaaaactgctggaagaaggcgtagatctgggtggcaatcagctggttggcgaaccgccgaagttctccaaaggtgctgttgtatctccatgcagcgattccgttgatgcacagctggcaaagatggaaagaaaagtagctgcaggtgcagaatatttccagactcaggctgtttttgagccggaaaaattcatcaaattcatggaaaaagcaaaacagttcggaaaaccggtacaggttggtatcatcatcccgaaatcagccggtatggtaaaattcatgaacaataacgttgccggtatccatgttccggatgagatgatcgaagaactgaaagcagacaaagaaagaacaaaagcaggtatcaccggcgtagagattgctgcacgtattatcaaagagtgtaagccatactgccagggtgttcatatcatggctctcggatgggaatccaagatcccggatctgctgaaactggctgagatctaaaatcagataaaagaaaatgcattcagatggtgtgaaccggaagttgcagaaagataagatggatgcaggttgtagaaatacaacctgcatcttttttgtattgtatatcaataattggtccggtggaccaattttgatttataatattttgccgtgagctggtattgacaaacgaggaaatgtgtcataaaatagttcgtgaacgaacgaacgctaccgaactgttcgcatccaaacaaatagaaaggaggtcacaggatgctgaaagtagaatacagggatcacatcggatttgaaaataaacggctggaaaatgagattcacagtcggatgaccgcctatcgtgcagcgatgggaggcgaggaattgacgatgatgcaaagctggattattcggtttctatatgagcattccgaagaagacatttatcagcgggatattgaggcggaattttccatagcaagatccacagcgacagggatcctgaagttgatggaaaaaagaggatatatccgcagagtcagcgtggaacgagatgcccggttaaagaaactggagctgacggaagttggtatcaggatgcaggaaggaacgatccgcaatatcaaccggctggaaagcacacttcgtcagggaatatcggacgaagatctggaagtgtttttccgggtaatccgtaagatgcgttctaatatcgagattcaacagggagaaacaaacaggaggagagagtaatgcttaaaacgctgggagctcagatcaaagagttcaagaaagactccatcaagactccgttatttatgattctggaagtcctgatggagatgctgattccttttctcatggcatccatcattgatgatggtgtggagaaaggagatatccgccatatctgtatcataggcggatggatgatcgtggcagcactgattggtctgtatgcaggtatcatgggtggtgtctgtggagccaatgcttccgcaggatttgcaagaaacctgcgaaaagccatgtatgaaaacattcagcagttttcattttccaatatcgaccggttcagtaccgccggactgatcacacgactgaccacggatgtaaccaatgtacagaatgcataccagatgctgcttcgcatgtttgtgcgtgcgccgatcagcatggtttgtgcgatgatcatgtctttttatatcaatgcaaaactggcaagtatttatctggtggcagttattattctgggcgcatgcctgttctttatcatcagccgggtgtccggatattttcaggaagtatttaaaaaatatgatgatctgaatgcgagtgtgcaggaaaatattgccggtatccgtgtggtaaaagcgtatgtgagagaagattatgaagacaaaaagttttccaaagcaagttacaatgtatataaaatgtttgtaaaagcagaaaagatcctgtcttataatgcacctctgatgcagtttgcggtatacagctgcatcctcggaatcagttggctgggtgcaaagatgatcgtaaccgatcagctgactaccggagaactgatgagtcttcttacatattgtatgaatattctgatgagcctgatgatggtgtccatggtatttgttatggtatccatgagtgtggcgagtgcagaacgaatcacagaggttctggaagaaaaaccggaactgaccaatccggaaagaccggtgacagaagtaaaagatggaagtatcgtctttgatcatgtaaacttcagctacaaaaaaggaagcggcgaatatgtcttaaaagatatcaatctgaatattcatgcaggagagacgattggtatcatcggtggaaccggaagtgcgaagtccagtctggttaatctgatcagtcgtctgtacgatgtgaccaccggtagtatcaaagtcggcggtatggatgtgcggtcttatgatatggagactctgcgaaatcaggtagccgtggtactgcagaaaaatgtgctgttttccggaacgattctggaaaatctgcgctggggtaacaaagaagcgagcaaagaagaatgcattcgcgcctgccagctggcctgtgccgatgaatttatcgagaagatgcctgaagggtatgaaacctatatcgaacagggtggttccaatgtatccggtggacagaagcagcgtctgtgtatcgccagagcattgttaaagaaaccgaaagtactgattctggatgattctaccagtgccgttgataccgctaccgatgcacggatcagggaagcttttgcaaaagagattcccggtacgacgaaactgatcatcgcacagagaatctccagtgtacagggggcagaccggatcatcgtcatgaatgacggtcaggtagatggctttggtactcacggagaactgcttgcaaataatcaaatttacagagaagtatatgaatctcagacccagggcggcggagattttgacgagaaaggaggtgtctgatcatgccaggaccaggaccaagaggaccgagaggtccgaaaccccgggttgaaaatccgggaaaactgatgggacgtcttttaaaatatgtcggaaaaaattacggaattcatctggtaattgtggcagtgtgtattttcgtcagtgtcattgccaatgtccagggaaccatgtttatgaaaaatctgatcgatctgtatatcatgccactgatcgggcagagcagtccggatttcggtccgctgcttggagcgatcctgaaggttgcggtattctatttgatcggtgttctggctaccttttcctataaccggatcatggtatatgtgacacagggaacactgaagaatctgagaaatgatatgttccatcacatggagagtcttccgatcaaatattttgatacccatgcgcatggagatatcatgtcaatctacacaaatgatattgacacgctgcgtcagatgatcagccagagtatgccacagctgttatccagtgtgatcacgattgtcagtgtctttgtcagcatgatcatcctgagtataccgctgacactcgtatctctggtgatgatcgccatcatgctgtttactacgaagaaagtagccggactgagcggtagatatttccttgcacagcagaaatctctgggtgcggtaaacggttatatcgaagagatgatggaaggacagaaagtagtaaaagtattctgtcacgaagaagagagtctggaaaagttcaatcagttaaacgatgaactctatgacagtgccaacaatgcgaataaatacggtaatattctgggaccggtcaatgcacagctgggaaatgtcagctatgtggtatgtgcgatcgcaggtggtatctttgctacttatggagtcggcggtctgacccttggtgcactggccagttttctgacctttaacaagagtatcaacatgccgatcaaccaggtcagccagcagttaaacggtgtggttatggcactggcaggtgcagaccgtatcttccgtatcctggatgaaaaaccggaactggacgaagggtatgttacactggtgaatgcggaaattgagaatggtgaggtacgggaagcacagaaacatacaggtcactgggcatggaaacattaccacaaagcggataatacaacgacctatcagccgttggaaggtgatgtggtatttaatggtgtggattttggatatgatgagaaaaagatggttctgcatgatatcaagctctttgcaaaaccgggtcagaagattgcatttgttggttctaccggagcaggaaagaccacgatcaccaatctgatcaaccgtttttatgatatccatgatggaaagatccgttatgatggtatcaatatcaacaagatcaaaaaagcagatctgcgtcggtctctggggattgttcttcaggatacgcagctgtttacgaatacggttatggaaaatatccgttacggaaagctggatgctacggatgaagaggtgatcgcggcggctaaactggcgaatgcggatggatttatccggagactgccggatggctatcagacgaaactgacgaataacggtgccaatctgagccaggggcagagacagcttctgtctatcgcccgtgcagcggtagcggatccgccggtgctgatcctggatgaagcgacttcttcgattgataccagaacggagaagctggtacaggatggtatggataagctgatgcatggacggaccactttcgtcatcgcacaccgcctgtccaccgtaagaaacagtgactgtattatggttcttgaaaacggacgtatcatcgagcgtggaacacacgaccagttaattgaagaaaaaggaaaatattatcagttgtatacggggaatacgggggaactggcgtagtatagttttttccctaagcggacgaaaccgggttcctcacatagaaaaacagaataatatgttcgacagtaaagagagaatggtatgatctgggattggttcgtgtgaaatcgccgggagaaaatatcattaccacatacagcatagagaggagattatgtgatattctacgaaaacgaacagaagtagatattggtattgctgctgaggcatataagcgatacgtggacagaaaagatagaaacattcctcaattatcggaatatgcgaagaacttccgagtagaagaaagagtgcggagatatttggagatactaatatgaaaaatgcgatgcaactaagccctgacagatgaaaaacgcctggatctcacattgagattcaggcgtttctttcttaaaaagatttattttccttccgtagcaaaatactccttcaccatcttcacaaccgtccccgacaacaggaacactgcgatcaggtttggaatcgccattaacccattaaaggtttctgcgatactccacagaagtcccagttccactgtagcaccaagaatcgctaccagagaatacacaaccataaacggctttaccaccttctcactggaaaacagaaactcgatacatcttgcaccatacagtccccatccgatgatcgtagaaaaagcgaaacaacacatcgcaacggctgtgaaaacagaaatccagctgccatatacagaagtaaatccggaaatcgtaagttctgcaccggcagcctgtccataagtgactgtggtaccgctgcacagaataaccagagcagtcagggtgcagatgacaatggtatcggcaaatacttcaaagataccgaacagaccctgtttcaccggctttctggtatccgcacaggcatgggcgatggatccggtaccaagacctgcttcgttggagaagataccacgggaaactccttttttcatgctgagaaagaagcttcctaccacaccgccggttacagcacgcgggcgaaaagcaccataaataatagaataaaaaacatgcggaatattacggaagttgatcagtacaacaccaagtgccagaagaatataaaacaatgccataaaaggaaccagtttttccgtcacacttccgattcgcttgataccgccaagaaggatcagaccgaccagaatcgtgatcacgattccgatgatcagattcagtgtgctgacagactgatcagaaatcaggtggaaattaatcagtgcggaatcgacagctgttgtgatcgtattgacctgtgtggcattaccggtaccgaatacggtaaggacaccaaaagcggaaaaaaggtacgccagccagtgccagtgttttttaagaccattttttatataatacataggtccgccgacaagatctcccttggcgttagtttcacgaaaatgtacggcaagggtaacttcagcaaatttggtacacatgccaaggatagccgagatccacatccagaagacagcaccgggaccgccgatggcgatggcacccgcgactccggaaatattaccggtaccgaccgtcgcggccagagcggtacagactgcctggaaaggcgtcagagaaccgtcagatgcgtctctttttcggaacatacgtccgatggtggtcttgattgcatagggaaatttacggatctgtaaaaaatgggtgcggagggtcagatacaaaccgacaccgatgatacagatcatagcagggactccccagataaaattgttgaccgccgaattgatggattcgattgtacttaacatagattatccctttctttggttaaaataaaaactgttatgctattccggtcaaaaaaagctggaataactttattagtatagcatagttacgtgaaaaagtgaagaaaaatatcccccgtggaggcttgtgaaaaaagaaacaattatgatataatgagcgttagcgagcgagaacaaacgaagtttgttcatcgggagcggcgaatggcgatcatgatagctgcaaaagcagcgtcaagcaccgaaggtgcgaatcatgacataatgagcgttagcgatatagtcatgcggagggacgaaaaatatatggaattactggaacagattgaagattactggactgacagagccgaagggtactctcaggtgaatcaggaagaactggcgggtgataaccggacaaactggagacgggaactggaacgtcattttccggaaaacagaacaaatgagacctataagattctggatatcggaaccggtccaggatttttttctattattcttgcagaggcaggctaccaggtgaccgctgtggattatacagaagcgatgctggaagaagctaaaaaaaatgcaggagcattcgcacaaaagatcacatattgtcagatggatgccagtcatcttgcatttgcggatgaaacatttgatgcagtagtcagccggaatctgacctggaacctggaagatccggagcaggcgtataaagaatggatgcgtgtgctgaaaaaaggtggtattctgttaaattatgatgccaactggtatcatcatctctttgatgctgaaaaaagagaagaatatgagaaagacaggcagatggtaactgaggccggactggaagatcactatacctgtacggatatcgatacgatggaagagattgcaagacaggtgccgctcagcaggatcgatcgcccccggtgggatcaaaagatactgcagaaacttggaacagtccaggtaagtgtggatacggaagtctggaaccaggtatggtcagaggtggaaaaggtcaattatcattcgacaccaatgtttggtatcgaagcagtcaaagagtaagaatcatacaggacggattgaatgtgaaatgatgaagaatgagaataaatttcagatagcagggctggaaataaccccgggcgagagatggcagggaacgctgatgatcggaggcggagaattcgtacttccggcggcggttctgcatggggaaaaagagggaaagaccgtgctgatcactgcggccgtgcacccaggggaatatgtgggtgtggagacagcagtggaactggcgaacgaattaaaaatggaaaaaatcacaggaacaatagtgatcgtaaaagtggtttgtcctgaagaattcgagcagcgggcaggaagtctctgtctggatgacaggaaaaatctgaaccggcagttcccgggagatgaaaagggaacaagaacacagagactcgccagtgccataaaaaaagaattgcacagtgtggcagattattatattgatcttcacagcggagatgaatatgaagatctgacgccgtttgtatattatgcgggaaaaggagaaaaagaagtcatcgaggtttcccgaaaaatggcgcaacacgtggacgttccgtatatggtacgctccaatgtggaatccggtggctcttataattatgcagcctcctgcggaattccgagcatcctgattgagaggggtggtatgggacgatggacgagagaagaagtagagtccaataagagagatctgaaaaatatcctgcgttatcttggcatttaccggaccagccgtggttactggaatcattatcccatggaagtgacggatgtggtatatcagtcggcaaatcaggccggtttatggtatccggataaaaaaccgggagatatgttttcagagggcgaaaagcttggaaaggtcacggactatgaaggaaataccctggagacgagttatgggggatatgacggtgtgattcttttccagacgggaagtctgcaggtgacaaaggaaggaccgatgatcgcctacggaagaatcgcttatgaaaaagatgaccggaaagaaaagatcgccggttactggacaaaacgaagttcagattttaaagagcagagaagagaagaacttcacagtccactggcgaaacgatggatagaagaaattgctaaatatttgccggaaaaagagcatctgcggatcctggatgtaggatgcggtgcgggatttttctctatcctcctggcgaagagaggacatcaggtgaccgggattgacctaacaccggatatgattctccatgccagagaactggcaaaagaagaacaggcagattgtgagtttcaggtaatggatgcagagaatccggaatacgatgacgatacctttgatttcgtgatctcccggaatctgacctggacgcttccggatgcacagaaagcctataaagaatggatgcgtgtgttgaaaccgggcggtgtgctgttgaactttgatgccaattacggagcagttgattttacggatacttctgatcttccgaaaaatcatgcccataaccagattgaaaatacactgatgcaggagtgtgaggatatcaaacgccagctgtccataagcaattatgcccgtcctgcctgggatctggaagctctcagcagcagcggtgtgcagcagttccagattgatatgggagtcagtcagcgtgtctacatggaaaaaaatgcgttctataatccgactccattgtttgcggtctgtggaaaaaaaggtgacttatgatcaatatcaaacagttaaaatattttatcacctgtgcagatgccggctctttcagcgaggcggcatctgttttatatacaacccagtccagcgtcagtaaggtgatccgggcactggaagaagagatgcaggcatcgctttttgtgcgaaatcctcatggaatcagcctgacaccaaacggaaaacaggcctatgcctatgccagccgggtgctggaaaacgtggaagcgatggtagagctgtccgcggtgggagatacccagtggttgaatattgcatttaaccccagttcctggattgcagactgctttgtacggttttatcagattcatgaaaaagaaaacctgcactgtcaggtacacaccggaaaaatgcgggaagtgctggagcgtatccatgaatacaaagacgaactcggtttcctctacgtgacaacccgtcagcagacggatctgcagtatctgctggtacgaaaacagctggaattcattccgttgaaagaactggacacctatctgtatcccggcggcggatacctgcaaaaagaaggaatacagctcacccgggaaacaatcgaaaatctgcattatatccagaacttcctggaagacgccggcaattacgaaggctggaaactggatacagaaaataatctgacccttggaaaaatcgatgtttccgtcgtaaccaacagcgactacattatggaaaagatgctggatcacagcagcctcgccaacatcagcggcgacagtcttactcctgggaagactccttcacgtccgggcatttgtcttaccaatgaatccagtaagattatgttcggatatgtaaaaagagaaaagacaccgttgtcggatctggcaatgaaatttcttgattatgtaaaacaggagttgatcggataaacaaccgggaagtttacatgttttggaatatggtcagtccaaaattgaatacctcaaaaccccccatggggcttacgacagaaatatggaaatgatatacttattatagttctttcgatgaggtgataaaatgaaaaagtatgtattgcatagatttttacagttaatccccattttactggggattacttttttgtcttttgccatgatgcgcctggccggttcggacgtggttacgcagatgtatcagaacagaggaacggaagtatcccaggaaattatagatgcgaaaagagcagaacttggactggaccagccattcctgatacagtatggcagatggcttggcggaatgctgacaggggatatgggagaaagttatatgaccgggaaaccggtgttcgctacttttctttccaaacttccggcaaccttgcttctgacagctttatccattatccttaccatactggtgtcgattccttttggcatacttgcagcggttacgcatgataagattccggatctgatcctgcgatttttcagctttataggaaatgctttacccaatttttttgttgctatgttactgatgcagctattaagcattaagcttcaactgcttccggtgatttcggatggagtgaccctgaagagtgcatggatgccggctcttacactggctgtttccatgtcagcaaaatatatgcggcaggttcgagccgcagtgctggaggaatggaataaggattatgtgcagggagcccgggcaagaggtgtgcgcagtcgcgtgatcttatggaaaaacgtaatgaaatcttcgatgttgacgattattacactactggcactctcaatcggaaatctgcttgggggaactgctattatagaaagtatttttatgtgggatggcgttggaaaactggcagtagatgcgattaccatgcgtgattatccggttattcaggcttatgtggtatggatggcaattatttatgtgctggtgaatctggtcacggatcttttgtatcaccgactggatccgagaattcgtctgggggtaacaaaaggatgagagaaccaacaattagaaaacagaatatacacaggaatcatttgaagattcgtctgatttttttgggaatactggcgttggcactggtgatcgcatcgtattttagtgaatatttatgcccatatgatccctatctgcaggatctgggtaatgcaaaggcagtgccgtccgctgcacatatctttggtactgaccgatatggacgggatatgctgtcccgtgtgatcgtgggaagcaagaccagtatttattccaccttattgctggttgcatttattacagtgcttggtacgatgatcggagtgttttgtgcctggaagggaacatgggtcgatacggttctgatgcgtatttccgatgtattccttgctttccccgggctggtgtttgcgctggcggtagcggcagctcttggaggtggtgtccataatgcgatcatagcactaggtgccatcagctggccaaaatacgccagagtggcaagaagtgaaactctggcacaaaaagaaacggtgtacctccgggcagcaaaactgtccggctgtggaacctggaaactgatttttaagcatatacttcctaatattacaggccccatcctggttacagcgatgctggatatcggaacgatgatgatggaacttgcaggtctgtcttttctggggctgggagcaaaaccgccggtggctgagtggggaagtatgatgagtgacacaagaaatctgcttacgacgcatccttgggtaacactggcacccgggtttgcaatctttgtatcagttatgatattcaatctgttgggtgatacggtcagagactggctggatccccgcaatgggaggtagaaaaagtgacggaagtcattcgttatgaacatgtagatatcagttataaaggaaaaagggttgtacatgatgtcagtttttctgtagaaaaaggtgaaatccttggaattgtaggagaaagtggcagcggaaaatcgacgctgatcaaagcggcgatgggtctgcttggaaaggacggtcttgttaccagaggtgatatctggtataagggaatggatcttcccgacctgaaaccgagggagatgagaaaactgtgcggaccggagctgggaatgatctttcagacggccggaagctctttttgtccgatccgtacggtacgggcacagctttatgaattcatgacagaacataaaaaaataaaagcagatgtatttgagaatcaggcagaggagctgcttgaaaaatttggctttgaagatcccaaaagagtactggacagttatccttttgaactttccggtggtatgcagcagcgagtgggcattgcggctgccatgcttttgaacccgaagatactgatggcagatgagccgacctccgcactggatgtaacagttcagaaacaggtagtggaagagatgcttatggttcgggaaacgtttggaacttccatagtgctggtaactcataatatgggagtgatccgtgcgatggcagacaaagtgctggttttacatgaaggtgagatcatggagtatggagtgacggaagaagtatttgaacatccgggatcagtgtatacaaagaaattgctggcagcggtttcaaaacttcggaggtaggaaaaatgagtgtggtactagcagcagaacatctgacaaaaacatttgtctctcagggacgagagaactacacggcagtagatgatgtgagtttttctgtagagtccggtgagaagcttggaattatcggagaaagcggaagcgggaagactacggttgttaatatgatcaccaggttactggatgtttcttccggaacgatccggctggatggagaagatatcactctgaaaaagggaaaagagttaaaagaagtatataagaagatgcagatggtatttcagactccaacggagagctttgatccgcgcaggaaactgggtgatggaattgcagaaagtctgatcaattatggaatgaaaaaaaaggacgcaatggtgaaggcaggacagcttctggaactatgtggattggaaaaagaatatacagcgcgctatcctcatgaagtcagtggcgggcagtgtcaaagggctgcgatcgcgcgtgcgatcgctatcgatccccggttactgattctggatgaggcgacctctgcgctggatgttacgattcaaaaagagatcctggaactgctggataaactgaaaacagagaggaatatgacatatctgtttatctgccatgacattgcactggttcaacaattctgtgacagagtgcttgtcatgcatcagggaaagattgtggaggagggaacgccggatgaggtgatccggaatccgaagacagaatataccggaagacttattgaaagcgttctgtgataataataacaggaccccccggctgggatatgagaacggataggaagaacggccagagattctgtaaaagaataataaagtgagaaacagaaagagaggaacagaagggatgaatgcgaaaaaactgatcggtactgcgttaagtgttgtcttatgtgcgagtatgctcgcaggatgcggaaatcagaaaaacgaaacggagacaacaactgagaaagggaaaaagaccctggtaatcggtgacacaacattcaacagttccaatgaagaaaacaatgtgaatccacatgatgcttattcaggctgggcctgtatccggtatgggattggtgagacactggtaaaatattcggataccatggaaatcgaaccctggctggcaaaagaatgggaaaatgtggatgaactgacatggaagattaccctgcaggataatgtaaaattttccagtggccgggatatggacgcggaagcggtgaaagaatgtctggagcatctgactgaaaatcacgaacgggcaaaaaacgatctgaaaatcgattcgatggaagcagatggtcagatccttacgattcatacttcagagccgaaaccggcactgttaaactatcttggagatccctatggatgtatcattgatgtggacgcaggatttgatgacggaatcgtagcaggtaccggtccatacatcgccgtggactgccagagcgatgatcacctgacactggtaaaaaatgaggattactggaatggaacgccgaagattgacgagctgacaatccgtaccattacagatggaagtacgctggccaatgcactccagtcgggagaaatacaggcagcctacggtatggcttacgaaagctatccgttatttgaaaatgatgcatatacattttcacagatttccacttcccgttgtttctttggaaagatgaattttgatgaaagttctgtatgtgccgacccagcagtccgaaaagcgattgccatggggattgataaggagaattttgttgcaaccttactggaaggcaatggttatgtggcaaatggagtatttccggaaggctctgtatttggtggagataaggtgacgacagaaacttatgatccggaaggcgcgaaagaagttctggaagcagcaggatggaaggatactgacggagatggcatccgtgagaaggatggaaaaaaattaacagtaagatggctgacctacccaagccgtcaggaactgccgctgcttgcagaatccgcacaggcaactctgaaggatatcgggattgatctggacatcaactgtacagcggacaataactctgtagcagatgatcccactgcatgggatgtctatgcaatggctaatgtacaggcacctaccggtgattcggaatactggtttactgtttttgcaacttccgatgcgacaaggaatcagggaaaatatagcagtgaaaaactggatgaactggaaaaagaactgagcgcggaatttgacatagaaaaacgtgcagaacttgctgtacagatgcagcagaccgttctggatgatcatgcattcgtcttctgctcgttcctgaaaatgagcatgatctccaaagcaaatgttaccggatatgaatcccatgcctgcgattattatcaggttacggcagatctggatattaactgagaacagatgtcaaaaagatgctatgttttaaagcatggcatcttttttcaggtttggaaacagaaatatgccggtggaagaaaaagagattatgcagtataataagggaaaacgggagaggagtaactgaatgaagaaaaaaatcataggaagtgtgctggttctcggaatcgttgcggttgcagcaggtctgtttgtaccaaatgcagtacagaagataacaaaaaaaagcgtaattacttcctcgcagctggaaaaagcggtggatatcagtgaactgtccacggcagagttcatatacaacgggatcgcagacaagtacagtgatggaaacctggaagaaaccgagtgccatatcgcgtatgcctccacggtgaaagtaggaatcgcgctggatcagataacatttaccattgatgaggaaaagaaaacggtaacgccggtactgccggaaattacggtaaatacagtaaccgtggatccggattcgctcagttttatcccacagaatccagatgtggagctgaaagatatcatgacggtgtgcaaggaagatgccctaaaggaagcgagtgagtcaaaagaactctatcagacggccgaagaaaatctgcagtcagccatcgaagcactactctcgccgatcctgaaaaatgcaggatatacgatgcagtgggatatatagaagaccttgaaatttgccggggaggaaaacaaaatgagagtacgaaagataacaaaaacatggatgcttctcgttgggaccgttgttctttgtctgacaggatgcggaaaagaaacacagactgctgatttttcaggggttacttcggtgtgtgaactggccactttgaagtgttattatcataatgttgcgaaagcggagacggaagcaagtggcattttcgcaaaatggctgaaaaccggatataagaaaatctggacggaatatagtgggattattgaatatggcatcgatatcagtcaggtcacagtatcggaaccggacaaaaacggtgtggtgaccgtgacgatgccggatgcacaggttttgaatgtagatgtggatgaagattctcttggtaccccgctgaccgataccggttttctgaccagtgttaccacagaagagaaaacaacgacactggcgggtgcgcaggaagcgatggagcagcaggcaaaagaaaatacagagatgctgtcgcaggcaaaagcacgggcgaagacgctgatcgaggagtacataaaaaatgtgggtgagagcatcggtgaggagtatacggtagagtggaaagatgcagagccgggaatgacgaagagtgagaaaaagtaagaaaatagataaggggaatgtaagaacagggctttaccatagttttgaaaatactgtggtaaagccttttatagtagattattattgcctgtttgacaaccagaacctctgaaatcgccatgaaatatctgataaatacttattttattggattttcgggagcgaaagttcttgcaactccgtctaatgtatgtaaacgttaaagaaaagcacctgtttttgtacgtacaaacagaaaggacaacaaatggaagaattaatcagtcaggcaaggaacggagatccggatgcttttacggcactgatggagagccagatgcagaatatgtataaggcggcacggtcggttctttgcaacgacgaggatattgcagatgcgatttcggatacgattctggtgtgttgggagaaactttcccagttgaaggaagccagatattttcgtacctggatgaccaggattctgctgaacaaatgtaacgatattctgcgaaaaagaaagcagatggtctggatggacgagatcccggagacgccggatgtggacgatggatttgagaacagtgagtggaaagaggcactgaacagtctggcggagaatttccggctggtggtgatgctgtattatattgaaggcttcaagaccagcgagatcagtcagattctggacatcccggagggaaccgtgcgaagcagactggcacggggacgggaacagctggcggggcttttgcaactgaaagttgtgaattagaaagaccggtcgggaaaacagaaggtaatcaggacagagagaatcagagatttgacagacaggagagtatttatatgagtaatgatagaattttacggacactgcagcaggatgtgaagattccggaagtggtaagaaaaaaagcagatcaggcatttgcaaagattcgtgcagaacaggaggaaaccggtatggataataagaaagtagtttcatataacaagaaaagaacaggaagaaaagtattttccaaaagaaagattgcggcagttgcagcagttgcggcactggcgactgcaaccgttacggcaggagcagccgcttatatgaagtggagcaccggcatggcagaaggtatgcaggcaacggaaacacagcagaaacagctggaagacaacggaatggcagcatttaccagtcagtcctgcacagatgcgggcgtgaccgtgacggcagagcagagtatcacggataattacaacagccatatttctttcaaagtagagggatttcaggtggaagacggacagcagccggactttggaagcatcagcgtgctggtggacggaaaagaggatctgaacctggatgccggattctatgacggcatcatcgcaggagatgacggaatgccggtgcgggcttccgatggaagttctgcattagacgaaaatggagacatgatgtattactatgtgcaggaagatggcagcatggaatttgacatcaatatgaacaactatagcgaaaaaggattttttatcggaaaggatattcaggtggaactgaaggatctgggaacggtagataaggcggaattcaccaagacactggaaggcacctggagttttgaatggacactcggcggcgcggatactgcaaagacatataccctgaaccagccactgggagacagcggtgcaacgatccagaccgtagagatttctccaatctctgtttatgcagaatacaatttcccgttacagaaagaaaccattaccacggaaaacgaagacggaacaacttcggaaagcacgacatttaaggaagctccggctctgatgggaatcaaattaaaagatggcaccgtgatcaaaaatatgtacatgggcggcggtgtgatcggataccagaataacagttccgatgattatgtctacgcctacgcaaccgaccgcatcatcaatccggaccagatcgcatacgtcctgttcctgaatgatacaccagtcggcgaccagggtctgacagaagataatttctatgaggtagctgtcggtgaaaatcagcagggcgatcgttgatacagcgaaaattaaaaaataatggaaagaaccggcgaatgcaggaaaacagatgcatttgccggttctttttacatagttgtggtttgaaaacatttcaaaccaaaggaataacagtacagaaaaattcttcatgagttgtgtcttttcgagcagaaaaagatatgttactatgaaagcagaaaaacattcctgtatacatttcgtaaaatgcaaaatacagaaaaaatcgttactttattgatgaaagtatgaataaattaaaatccaggctaaggagatacaaaaaatgaagattataaaggcaaatgaaacacatataccagagatcctggagatttatgcaaaggcaagaaaattcatgaaagaaaatggcaatccaacacaatgggaagagggatatccgtcgcgagagatcgtggaaaaggatattgcagcagatcattgctatgtctgcatggaaaatgagaaggtggttggggtatttgtctttatcattggcgaggatcctacatatcgcgtaatctatcagggggcatggcgcagtgagacagaatatggaacgattcatcgaattgcttccgatggcactacaaagggatttgcgagaagatgctttgatttttgcagacaaaaatgtaactatctgcgaatcgatacccatgcaaataacaaaccgatgcagggagctatccgctcgtacggattccaggagtgcggaatcatccacacaagagacggaagcgacaggatcgcgtttgattatattgaggaaaaatgagagacaggagtgagaatttttttaaaaatgatatttatcctgttaaaaaatatgtattacaaataagtgttggatacaaaagaaaagaggacagttctatggaagagatgcagacaaaagaaaagcagatcgtatatgatcaggcgctatacgaaaaagcctatgaatttgcaaaaaagaaacatggaacccagaaaagaatcggtggggatccgtatatcacgcacccggtggcggtagccaagattctgaaaaaagaaggctataatatcgagtatctgatcgttgccctgtttcacgatcttctggaagacacagatgccactgaagacgagatccgatccatcgccggtgaagaagtcctgcaagcggtaaaattgctcaccaaagaaaaaggttatgatatgcaaacctacgtcacccgcatccgccaaaatcccatagcctacgccgtaaaaggagccgaccgcctccataacctgagaactgcctcctgcaccagcagacacttccgccaaaaatacatcaccgaaaccgaaacctggtacctctctttccgcccggatatccctgcagaagtggaaaaactcaaacagaccctcacagacgaaaatactgataatagattttcgcaggcatcatcagaataagaaaatgaaaaataactattaagatgagaaaaagaatagcagaaataataaaagttttggttgcaaaaagtgtaaacaaaaacatgcaattgcaatgataaattgaggagaaagagtgatcttataataatttgagagagttatttgtaaatagaatcaaagaaatgatgaatttataagtagaaatattaaatatataagacaagaggaatagattaattaagaattagtaagtgcaagaattaaaaaaattcagaaaataggaaaaacagcctcggaggtagggagtctgtgtgacgcaacactttgttgcattgcatccggaggaagctgccagtggcaggttctgtaggtgggcggttagggcaagctttgagatccagcatttacgcagactttcgcgagggtcagctgaccctcgtgaattatagtcggagttaatgcttagctcaaagttgccctgcccacgttgcgccacacagactccctacctccggggcgtccgtctggaacaaactctcaatacaaaagttagataagtttcgtctcctccaacttctctgtaaacccatcattcatccgaataatcggtcgtctcaacaccagtcccacaaccagtgaaacaatcaagaacactccaagtttcccaagatccatccaataatccataccatacacacctccaacagcctctctcatagcagccatactgtgcgtaaacggaagcagcggataaaccgcccggaaaaatctaggagccacttcaatcgggaaggtaccgccggtaccggcaacctgaacaaccagtaaaaccacactgatcgctttaccaatatccccgaaagaaaccgtaagcgtataaataatatttacatacacgatacttgagatccatcccgccagcacaaacaaaaacggatgtttgcactgaataccaagatagaacagatccccgagacaaatcagcgaactctgcaacagcccaacaatcaggaaaatcagataccgtcccaagtacatctggtgaagcttcacattctttaaaccatcaagtctctttttcgataccgtaactttcagcatcgccaccagaacaatgccgccgatccagatcgaaagcgtagaataaaacggagccatggcagaaccataattttcaatcgggtaaacttctgtagttttcagagaaacgggtgcggagaggaacgaactgatactgtccgtatccccggcaatcagagattccagttgagaaaaatccccgctttcctgcatactgctcaattttccagtcgttttttccaatttctcagaagcctttgtaagcagcttacaggagtcatccagcgtggtctggatctcagacagatcagaacttgccgaatccgccagtgtatagatgccatccatactgttatccagctgcgtcatcagcccggagatatccgaacgggtgtcagagacagaagagagcagactgtttaactgcgcctgaaccgaagattcatactctgattttacactgctgatgccggaagcgctctgacgaatcagatcatccagctcttttttatcattttccacatccgaaaccgcagaagtaagagaagatgcggttgcatttaacttatcgcggatttctttttgtgtggtgatagaagcatccagttttgccaccagagaaccggtgacagaagtcagtgcctcatgttcctctccaatctgtgcgatactgtcccgaagggaagtataagaagtaatcacctgatcgacacgaccggcaagtaactgtaacgtatcggaaacagcggaagcatcggaactctgtgtctgcaaagcggaatcaatcacttccgtcatctggtcataaaaccctttgctggcagtcagtgccgtattgatactgtccgtggtcccggaaacggtctgttgcagcccggaaaatgatttctgcgtctcttttaaggcatctacattggattttgtctgcttctgtgtctgccgcaggaaagaagcagttgtatcaagaagctgctgtgcggaagaagtcataccggaaaaagactgcagagtgctggaagccgtggtcagatccgtatggatcttttccagattggtgatcaggttgccgacaatctcactggaaccttcgcggtctgccgcatttgatacggtctgcagggcggtaaatacggtgtccgagatcgtctcaataaagacttcattcacctgtgtctgaatcgcggttgcccctttgtctgtgactttcggtgcaatagcattttctttcgcattagaataatacgtgatctccggtttctggatatcactggtgaatacactcatcatattccggctgaaatcttcgggaatgacgatggctgcatagtatttgccggattttacacctttcatggctttggattttgtggtaaatacccactccagctgcgtattttcccggagggcagatagtacctgatcgccgagggtgagtttgatcggaatgatacttccctcatagccctcgtccacgctggcgaccgccactttcagattaccggtattttcataaggatcccagctggcagcgatattgaaccaggcgtacaggcagggaacaacggtgataccgatgatcacgatcatagcgatgacatttttctgtatctgttgcagatcccgctggaaaattttccatatatttttcatcgttctttttcctcctctatcacgtgtaccaggtcttcggaagtgataccgcccagttccatctggcgccggatcttatcgtgaatgtattccacacagatcagatataagaccagagcaatcagagagacgatccagagaatcagataaacgattttggattccaggctgaacatcaggatcaggaagatcagagggatgatcacgatggcaaggaaaccatatcggatcagatatggataccgtcgctcaaaacgttccgatttttccataaattcttttcgtgcctcatcatcacgcatcagtgcacgaagcatcagctgcatctgcgggcgctgcagttcatcactggcggtttctccaagcatcagatctgtctcatccagtcgtcggtcaaacagatgattcagattcatcaacaggagacgaagaaccagtccgataaagaacgcaagcagtaaaaacagcgcaagaattcccagattttttgcataagtatgaccatagaaaccggcgatacattctctcatcgcgctgatgccgtaggaaaatggaagcagcggatgaagtttctggaaaaatatcggtgtcatctcgatcggatacgttccggaagatcccgggatctgtaagatgaccagaagaacagcaagcgcttttccgatgtgtttgaacgtcagagccatcgcatagatcaggttgacatatacaaacgaacagaacataccggcgaggatgaaggccgccggatgcaggcactgtgttttcagcaataaaatatctccggcacacacgatgaatccctgaatcagccccatgatcacaaagacaagccagcgtccgaaataagcctgagaaggagtgaaacgggagattttttcatccttgtctacttcctgttttaagatcgaaactaggatcagtccgccaacccataaagccagattggtgtaaaaaggtgtcatgccggatccataattttccacttcatacaatactttcgactgaatagaaaccggagaggacataaagtctgaaattgagtcggcatccagtccctttaaagtgatcagctggttataaatatcggaagactgtaacacaccaagatcggtagtgatcgtggagaactgctgatcgatggtgtccagcacaccgccggtctgtccgagggcagcagaactgtccgacaggctggtatccagctgggtgagaatcagttttaactgttctatggtcggattcacatccgaaagtgttgcggtcagcgttccactcaaggtagataatgtatccatggattgacttaacttcggaatcagagattcattcagagaattccggtaagtctgaagtgaggaacgactgtccgtcaccagtttttccagagaagttctggtattctgtgctgtggtcatagcttcctgaatactggaattactggtactcaaagaatccagaagttcctgaaaagaagcattctgctgttgcagaacagtaattttctccccaatcagcccggaaagcgtggaatcggaaccgatggattcatgaagcttttgaagttcagcgagtaattctgcctgtttctggttcagactggttacagaatcgatactatcaccgatcaccgtattcacctgagaagctttcgtctcgaacgtaccgagttttacaattgcggaagcgtacgtgttatttaacagtgtttcaccattcgataatgcactgctgaactgactcgagaaagatcccagtgactgtcggctggcagcaagaagcgctgtcgtgtcagtcagcgttttggagccggagtccgcggcagaagatactgcatcgagagtctccagcgcatccttgatcagcttctcggaagaaccggatgtttcttcaaaatttttcagaactttttgatactctttcagattgtctctcgtctcagaaagtgcagtggaaagttcggaattgctcttatcaatctttccggtcagatcaccggcggaagtacggatcagttccgataccgtttctgcggctaccgaagaaaacgtgtcgttgatctgctgctgaatcgtcgaagcaccggttgcagtaatcttcggagcaatcgcatttttcttctcattgatatagtagtccagttccggctgtttcacctcgccgtccagaatactaaggagcgattcactgaaattttcgggaatcacgatagcggcataatattttccggaagtcacaccggcttttgcctgcttttcatcgacaaacgtccaaccgagctgcttatttttcttcaacgtatccacgatagtgcctccggcatccagagacatcatctctgtactggctccggcatcacagttggcgatcgccactttgatgttactggtattgccgtaaggatccatgttggcggcaatattgaaccaggcgtacagcgatggaagaacacacacgccgaccatgacgatcgctgctgccgggttggtaaataaccgccgcatatcacgggcaaagatctgaaatatctttttcatacacacagagcaaccggaaatatccggtcacataacctccttttagttttctgtactctcaaaataagagagtaaatgttgtagaaaagtataacaaaaagtgatagcaaagtccagaaagccgccaagataaatgtatgaattttcttcaaaacctaccaactttacgcgtatcttcagttcccaaaacctgccaactttacgtgtacctcccgtctccaacacctatcaattttacgcacatcttccgtctccaacatccagaacccatgcccaggcttccactcgtcagacagccttatgctggcgcccttagcaaagatgagatccagcatttacgcaggctttcgcgagggtccgccgaccctcgtgaacatagccggagttaatgcttagctcggatttgcgttgccagcggttgtctgacgagtggaagcctgggcatgggttcgtccgtacacgaaaagatttcgtccgtacgcgaaaaggtttcgtccgtataccaaaaggtcagatttacagtaagttagcaatgtgctaaaataaaaaccagcaaaacaaacagaagggaagatgagaaaaatggcttgtacaacaatcttagtaggtaaaaaagcatcctacgacggatccacaatgatcgctcgcaacgacgactccggatccggacattttacagcgaaaaaattcacggtggtaacacccaaagaacagccgaaaacctatatttccgtgctctcccatgtgaaagtagaactgccggaacaggcgatgcgctatacatccatgccaaatgcagaaaaaggagaaggaatctgggcagcaagcggtgtcaatgaggcaaatgtagccatgacagccaccgaaacgatcacaaccaacccgcgtgtacagggcgccgatccgctgatggtatatcagccggcaaaagacggtcaggaagaagtaccgggtggtatcggagaggaagatatcgtgtgcctggtgcttccttatattaagagcgcccgcgagggtgttgcccgactgggacagcttctggaaacgtatggcacatatgaaaataacggaatcgctttccaggatgctgacgagatctggtggctggagacgatcggcggacatcactggatggcaagaagagtgccggatgatgtgtatgtcgtgatgccaaaccagcttggtatcgatatctttgatctggaagatgcgctgggcgaacagaaagaatatatgtgctccccggacctgaaagaatttatcgaaaaatatcatctggatctctcgatggacggtgttctgaatccaagagatgccttcggaagtcatgacgattccgaccatgtatacaatacgccgagagcctggtacatggaacggtatctgaatccgaattccgtaaactgggacggtccggacgccgattacacaccactgtccgatgacattccgtggtgcatggttccggaaaagaagatcacgccggaagatgtaaaatatgtattatctgcacattatcagggaacaccatatgatccgtacctgtcctatggagacaaatccatgagcggtgcgtaccgttcgatcggtatcaaccgaaatgattttatgtctctgatccagatgcgcccggaaggaggagctggatttggaacgctggaatgggtggcttacgcatcgaatgcatttaacacgatggttccgttctatgcggatgtggacgagacaccggaatatcttgccaacacgaccggtgaagtctctaccgaaaacttctactggaccagccgcatgatcgcagcgatggcagatgcttcttatggaaaatctctgttccatgtggagcactatcaggaaaatgtcctggcaaaaagtcatgcactgatcaaccagtacgatgcacttcttgctgatgaaaaagatccggaaaaacagatggaactgaaacgcaaagcgaaccggaaagtggcagaaatggtacagaaagaagcttctgcgacattgaaaaaagttctgtatgaactgagcaaccagatgaaaaacagttacgccagatcggatgtgtaaagatgtataaaatcgcagtgatcgaagacgacacgctgcttgggcaggcgctggtggagatgctcacgtcccatggatatcaggcatttgtagcggaatctgtgacaaaagcccgccggttgctggagagacagccggtggatctgcttttaatcgaccgcgggcttgcggatggagacggcgtggaactgtgccggcaaaggagagggcaggagaaattgccagctatttttctgacagcgagagatgaagaagaggatatcgtagaagcattcgatgcgggtgcggacgattacctggtaaaaccggtggcacttgcggtgcttttaaaacatatcgaggcggtgcttcgaagaacaggcggtgagccgaatcaggtgttttattatcaggatttcagcctggactatgaccggaaagaagcgaggatccagggacagccggtagcgctgacaccgaaagagtacgggattctggaagtacttacgcaaaatcagaaaaaagtagtaacaaaacgcatgcttctggaacaggtctgggatgatggcgggaattttgtggaagaaaatacgctgcatgtgacgctgaaccgcctgaaaaagaagatcgagccggatcctgcacatcctgtgtatgtgaaaaatgtgtttgggctgggctatacgtttggagaataacatgtttcgaaaaagaaaagcacagcaggagatggaagagatttcccggatgctggagcgggttctgaacggggaatgtatccagccgggagaaatcgggtatgaagatacacttccggcaaagatccgttatcagattcgcaggatttctgagaaaaatcagggcgtggaagcacggattaccagagagcgggatgagacgaaagcactgatcggggagatcgcgcatcagatgcggaatcctctggcgggcgtggagagttacacacagcttttagagggcgagatatcgggagagccgggaaggacatacctgcgcgcactggaacaatccgaacagcggctgcattttctgacagaaagttttatcaagatggcgcggctggaacaacagatgatccagatcaaaaaaacaaccgatgctctggcggatacgatattttcagcggtacttctggtacagaaagcggcagaagaaaagcagatggaagtggaagtaaccggagcggaagagacaaaagtgtggcatgatgggaattggcttggcgaggcggtctataatctattggataacagcgtaaaatacgcaccggaacactcgaagatccgggtcgtcgtgcggcaggatgaaatgtatacaagaatcgtggtatctgacgatggcatcgggattccggaaggagaagaaaaccggatttttcagcggttttaccggggaagcagagtgaccggagaaccgggatttggtctgggactgtatatcagccgggagatcgtgacgctccacggcggattcatgaaagcaaaaagaaaagaacagggactggaagtagcgatttttcttcccgtgtaagcagtttgtaagttttggctgttacaatcatagaaaagcagagaaaaagaacagataactgcgacaggaggaagaaagatgcagatacttgagacaaaagaggtaaaaaaatattatcagacaccatccgggatcgtgcgtgccttggatggtgtctcactttctgtaacggaaggaaccttcggggctatcgtcggctcctcgggcagtggaaaaaccacactgcttcatatgctgggcggtctggacgagccgaccgacggagaagtatgggtgcggggaacctcactgaaggaaatgtcaggggaagaaaagacggtttttcgaagaagaaatatcggatttgttttccagaattataatcttgtgtcgacactcagcgtccgggaaaatattacgctgccgttattgctggacgggatgcaggtcgatcggaaattcctgaaagaaattaccgaaagcctgaaactgacggaaaaactggatcacatgccgcatatgttatccggcggtcagcagcagagagtggcgatcgcacgggcgctgatcacgaaaccggcggtgatcctggcagatgaaccgaccggaaatctggattcagtgaccgggatggaagtgatcggactgttaaaaataagcgcggaaagattttatcagacgattctggtagttacacataacgaagagatcgcgcagatggcagagcggatcatccgtatcgaggatggaaaggtaacgggtgattcggatgaaaaataacaatcagaagatcctgcggcttctggcaaaacgggagtatcaggaaaataaaagacgaaaccggatcctgatcgggacggttgcatttgctgtgtggatgatattttgtgtgttcagtctggctatcggaaagatacaggcagattatctgctgatggtaagaaatggaggaacgaaagccagcacaacactggaggatccatcggaagaacagtatcggaaaatacaggaactggcatatatccgatctgcgggaatggaaacggattttgctgccacagacgcttttttgtgtacagtgttagacaagacggcgtgggaaaacatgcagaaaccggcgtatacggatattcatggagagtatccgacgaaagagaatgaaatcatgctgcccatgcgggctctgaagctgcttggggttagcaaaccgaagctagggatggtaatcccggtgacgatgacggacagtgagggagaagaacactccggggattttcggttgtctggatattatacggaatatgtagatccttcgatgggaaaagcgtacggctatttttcaaagacctatctggatcagctggatctttcggaagtatcgagaacgctgctgatcgaacagagcaggagcgtggacggtcagacggtggaagaccggttgtatcaggatattccgatgcgcgatgacagtcagcagtttttcggcggtaccggactgggtctggaggctgtgaccgaactggtcggcggatatgatatcgcagcggtgatggctgtcgtgatcctacttgctgcgtggctgctgatctataatgtgcttcatatttcctatggaaaagatatccgaagattcggtctgttaaaaacattgggaacaaccgggaaacagatccgaagcatcgcgtaccgccagatacggaaaatcgcggtgctgggatgtctttggggaagtgtggcaggcgttgcggttaccctgacggtgattcctgcattgctttcgaggatgtatctgcatggcctgggaaaagcctccgcgatgatcgcgtttcgtccgtggatgctggcagcatctgtctgctttggaatgttggttacgtttcttggagcagccggtgttgtccgaaaaatcggaaaactttctcccgtggaatcgatacagtatatggaaaaagtatctgccgggagaaaaagccgacgacagagtaaagatccgctgaaagcgatggcgtggagaaatctgttccgttttcggaaacggtgtgtgctgacgatcgtttcgcttactctcgggatctgcgtggcactttctgccgttgtgatcacgaatgggacggatatgaccaaccagattgaggcggaaaaccatgattttaagatcatgacaaatatatcctccgggacgatcagccagtatccgacggaggagacgtattttccggaagaactgattgacaaaatgaccggtctcgacggtgtggaaaaggtgtcgaaagtaacgggcggttatggcaagttacagcttgatgaaaaaatcctggatcttcgaagaaaaacgctggaagagaatcagatccctgaggagaatacggaaaatatagaagaaaccgctccaaaattttatgagttcgtggcagaactggtcagcgatgattatctggaagaactgaaaacacttaacgaagagaaaaatttgggactggatctggaaagcgtggaagcgggaacgggtgcaatcatgctccactataatctgttctcgagaatcgaggcacaaaaaggcagagaggatgtgggagagacattttccacttatacggtgcagggagaaaagacggcggatatgaagttttgcggctacctgaacttcaaggaaaaaggggctccggcactcgacacgacctggaacggaccggggatcgtgtattttctggtgagcgagaagggaatggagcgaatgcagctgccggtacagacctttgtactggagatggatgtcaaacggtcgatggagccgatgatccgggaatctgtagaaaaatccgtggacagctataatatgcagttcgtgacggaaagcagccatggagattatatctcggattcgcggacactgatgctggtaagcaaatcagaactgttgtccgctgccagatcctatatcgcgtccagccgaatcatcatgtacggactctgtctggtgctgctttttatgggattgatgaattatttccatgtgatcgtaaccggatatactgtaagacaaaaagaattttcagtgatgcaaagcatcggcatgacaacccggcagctgaagaacatgacgcggatggaagggattttctacggactgattgtcggggttctggtattgacggtgggaagtggagtgctcggtgctgttgccgtggtgatgaaaagccgggttggttattttagatttgtgtacccgtggagagaactgatcggtgtactgttgatcctcggcggactctgcgtggcaatcccggaaggggtgttccggcggatgcggaagaaccgggaaattgagagagggttctgatagaaacagataagagggagaagtgtatgtaacagattttgccttgacgaacgtgcggaaaaactgttatactttcatccagaacgggaatgaggttctcccacgatttttgatcgaaaccgccaaaaggctgatgacttctgtgcatggcacgggagtatcagccttttttgctacaggaactatcagttattagttcggcggttcaattttgattatgcagggaatgagtcagattcgcgaagcgtattttatctcattcaggggagaaataaatcagaagaacatggaggaaagagaaaacgaaatgaaacagaagaaaacaggaatatctgcagaaaaaaaggaacaatggattctgcaaggaaaatacgtgattcttgccgtattagtaggcatctgcgtgggaatcgtcgacacgattttcggaagagggttgctgacaatttcggattttcgtgagcaatattatcgttatctgctcccgattcttccggtggccggtctggcaattgtctggatgtatcagcgtttcagcagcctgagcctgaaggggatgacactggtattcgaagtgggacagaaaaaacgggaagaaataccgctggcactcgttccgctggtgatgatcggaacgtggatcacgcatcttttcggcggcagtgccggacgggaaggggtggcggtgcagattggtgcgatgctctcgcatgagacgggcagacggctccatatcaaagaaacaaaaccggtgatgctgattaccggtatggcagcgggatttggcgggctgttccagacaccgctggcagcagtattttttgcgatggaagtgggggtttccggttatgtggaatatgatacgctgcttccggcactgatcgcgtcctatacagcatccacgacatcacatctgcttggactggaaaaattttctgtagatctacaggaaatctggaaaatcggagatgtaaaaaatgcaggtattctggtaatcctcggtctggcgttcgggctgaccgggcggtgtttttctgtacttttgcagaagacgaagaagctggcaggagacaaaatcagcaatccactggtacggatcggctgtcttgcgatccctcttgcggttatattgctggcattacacagtgcaagatatagcggactgggaaccaatctgatcacggcatcgtttgatggagataccatctatggatacgactggatcctgaagcttttgctgacgatcgcaacacttgctatcggatttcagggtggtgaggtgacgccgctgttttccatcggcgcttcgctgggagtagtgcttggttcggcactgggagttccgccggttgtatgtgcatctcttggttatgcagcagtatttggcagtgcaactaacacggtaattgcaccgattctgatcggactggaagtctttggaagccagaatgcgatccctctggttgtggtctgcctgctggcatatatggtcaatggaaatcattcgatctatggggcacaggtgaaggcgctgtgcagttttgaagaaaaataagaatataacaactaaaagtggtatggtgactgacaaacagatgctataccacttttttgtactttattatattttaacataactactgataagcaaaatatatgaaaaagccatattaaatatattttaaaccgttgcaaaatatatttaatatgttaaaataagaatacgaaaacagaaaatgacagcaaaacatagatggagagaaaatcatgagcaaaaaattaatcgtatttatagacagcggagacactttggtaaatgaaggaaccgagtacagaaacgaaggttcaccgatcgtacaaagctgcgaattgatcgacggtgcaaaagagatgcttcttactctgaaagaaagagggtatacgattgaactggtagcggatggatatacacagtcttttgataattcttacggtcagcatggattgaaaaatattttcgatgcgagaacgatctcagaggaagtaggagaaaaaaaaccgttacaggcgatgtttgagacggcgatgaaactgctgcatctgacggacgaagataaaaaacgtattattatggtaggaaataatttggagagagatattgtgggggcaaatcgttttggaattacttcggtatttatcaagtggagtccgcggtatccgatggagccgaaaaatgaggaagaagtgccggattatatcgtccacaaaccattggaattgttggatctggtggaaaaactggaggcagaattagaaaaaacggagggtactcatggcgaagaagcagtttctatacgaaaatgtatataatgatctgaaacagaagatagagtgtggtgatctgaaaccgggtgataaacttgcggtggaggaggatatgattgcacattacggagtgagcgcgatcacggtaaaaaaagcactgaatcttctggcagaagaacacaggattcgcaggatcagaggaaaaggcagttttgtcatggaatacccggaagttggcaggattgaggtggaagaaaaagcggtattaccggaaaaatcggagagtattcagacaggggaacctgttctcggagtaatttttgaacatattagttccagctatggtctgcagatcatgtatgaactggagcagctggccagaaaggcgggataccatctgtacccatgtttttcctacggaaaccgggaattggagacacaggcaatccgctatctgcgcggtatcggtgcgaagggaatgtttgtaatgccatgccatggctcgtattataataccgagattcttcgactggtgattgacggatatcccactgtacttattgataaaaaattagatggaatttcactggattcggtacggacggacaatgtgcagagcatgtcgcggctggttcggtattttgcggaaaccgggaagaaaaaaataggatttatcacagtggaagaaaccggaacgtcttcaattggagaacgcaatgaaggattttatcagggaatctccgaatatggtatgactccggtcggaaagtgtagtctcccgtatattacctatgataatccggtggaagtccgcggagagatctatcgaaaacagattgcagagtatattgagagatactgcagggaactcgaaggtatcgtatgtggtgagtacagtgttgccatggagacagaggctgttctggaagcaaaagcgttaaagggcaaaatagaagtgtgctgcatggatgaaaaccacatcggatccgggcagtacaaactgacacatatccgccaggatgagcagaaaatcgcgcagtgtgcgatggagcgtatgttggccaaactgaatggaaataccggagaggaaaaagactatctgattccggggatctttatggagaaaatcgcttctgaaaaagaataaagcgtgaaaggacagaccagagccgtgacatccgacctggtctgtcctttctataaaaaagatgatattttgtgaggatctgcttactggcagaagaaagatacgattattttattccggtaaagttgaaaataatatgcattaaaataaagcataataaataagaaacaaagtatattgaaatgtttgaaaaagcatataaaaatatgatatagtataataaaagaaacacgagaacaaaaagttataaggaggaatcgcatgtttggtttttcatgtgcggaatggacaattcccaatgttttgattagaatcgtagtttccatgatacttggatgtgtgatcggtcttgacagaggattgaaaaaacgtggagcaggaacaaagacgaatacgatcgtatgtctgggagcaacgctggttatgttgacggcgcagtatatggaggtatattttcctgggaaatcggatctttcgcgtatggcatcgcaggtgatcagcggggtaggatttcttggagtaggaaccatcattgtgtccgggcatcaggtgaggggactgacaactgcggcaagtttatgggcatgtgcatgcgttggtcttgcagtggggatcgggtttctggatggtggagttatcattacggtgtgtgtattgatttcccttcacgtgcttccacgtctggaaaaatatttttttcggcgcagtaaatatttatccgtctatgtggaactggaaaccaatggaagcatttctgaatttttggaaaaacttcaggagaatcagatacaggtagatactatggatgtgataaaggggaaaacgaagaaaacaccatgcgctctgctgttgactctgcggttacctactgcatacaaaagtacatatgtggaacaattggaagagattccgggtgttaacagcgtagacattatctgataatgtactggtattgtaagagtaagaacatggggcagctacggacaagaatgaaatgaggttttaacgatattacagacagtagtattgatttctcacagcacagagtggtatgggtgtagatgaggcactggacagtgcacaggaaactgtagaattcaccatgagttcgaattaaacagtaacagctaacaatagtcttttcatgctttatcatccttagaaaatatgtagaaaacagaacaggacagatgtcagcacttgcatttgcccggttctttagatatgttttacagaagtttagattctttttattttcaccccgcaaaatttatgttagtatataatcatctgcgaaaatcggcgttgacaccggatgatcttggtgttggcgccgtatgttttatggtggtttatcatgaaaacagcgaagcaaaagaaaggaaagaagaacatgcttcaaatccaacacattcgaaaagaatataaaacaggaaaactggttcagaaagccctggatgatgtcagtctgaatctgagggataatgaatttgttgcgattctcggacccagtggttcaggaaagaccacactattaaatattatcggcgggctggatcgttacgacagcggggatctgatcatcaacgggatttccacgaaaaaatacaaagaccgggactgggattcctaccgaaatcatacgatcggattcgtcttccagagttataatctgattccgcatcagacactgctcgccaatgttgagctggcgctgaccatctccggcgtgggaaaagcggagcgaagaagaagagcgaaagaagccctggaaaaagtaggtctgggagaacagattgaaaaacgaccaagccagctgtcgggcggacagatgcagcgagtggcaatcgccagagcattggtcaatgatccggagattctgcttgcggatgagccgaccggagcactggacagtaataccagtgtacaggttatggatctgctgcgggaggtggcgaaagaccgtctggttgtgatggttacccataatccggaactggcggaactttatgccacaagaatcgtcaatctgcgggatggaaagatccgttcggatacaaatccctatcaggtggatgaggcagcactgtccccgccggaacataaaaatatgggaaaatcttcgatgtcatttctgacagctctggcactgagttttaataacttaaagaccaaaaaggccagaacccttctgacttcctttgccggatcgatcggtatcatcggtatcgcgctgatcctggcactgtcaaatggtgtcaatgcttatatccagtcggtggaagaagaaacgttatcggaatatccactggagatccagagtactgggtttgacctgacttccatgatgacgatgaacatggggacagatgataaagacgcggagaaagaagacgacgatcaggtcaatgtcgtgcagatgatcacaaatatgttctccacgatggactccaatgacctgaaatcgctgaaaaaatatctggatgatcatgaaaagaaagtcagcaaatacgcaaaatccgtggaatacagttacagcgcaacaccgcagatctttcgactggacaaagatagagataagattcgtcaagttaatccggacaaatcctttgcttctctggggcttggttcttcgtcgagtgcaaatagtatgatgtcctcgatgatgagcacagatgtgttttatgagatgccgagagaggagaatctgtataaaaaccagtatgatgtaaaagcaggtcgctggccggaaagttatgacgaatgtgtggtagttatgactgcggacggaagtatcagcgattttctcctgtacacactgggactcagagatgccatggaacttgacgatatgatcgaacagtttatgaaggatgaagatgtggatactccggataatatcggcacataccgttatgaggatattctgggaaccacctttaaactggtcaatgcttcggattattacagctatgacagtgaatacaaggtctggaaagacaaatcggataataataaatatatgaaaaaactggtgaaaaacggggaagacctgaaagtggtcggtatcgtgcaaccatcggaggatgccaacggagccctgcttcgaaccggtatctattatccggcagagctgactgatcgtgtgatcgaggaagcgaaaaacagtaaaatcgtaaaagctcagatgaaaaatgaagatattgatgtctttactaatgaagaatttggtaaagaatcgaataatgattttgatatgggatccctctttaagatcgatgaggataaactgcaacatgcatttaaatttgatgaaaatgccatggccaatgcaatggcagggagcacggatctctcagatgcattttccgtcgatccgaatacactggatctttcgggcatgctggatctgagtgccatcaatatttcgcttccggaagcaccggatttgtcgctcggtaatttgatgagtggaatcaagatccaggcatccagtgaagatgtgggcaaacttactacgactttgttaactggttatcgtgactatgcaaaagaacatccggaagcagattattccggtttgggagagaactttatcggttatctgaatacagaaaaagcacaggaaattctgaaaaataatatcaaagacatcatcgaagcgagcggttctgtcgaagtatcaaaagaagaactgcagcagctgatcaaagatatcatgaccggatttcagaagtatgcccaggaaaagggctatacggatatgacgaagctggatgaatacctgacggaatatctccagacagaagaatgccagcagatcctgactgcctgggcagagaaaaatattcatattaacggagatgtcaatatcacaaaagaacagctggaaaaactttcgaaggagctgctggaaggatatgaagcctatgtacaggaaaacggttacccggatccggcgaaaatgggcgagtactttatggattatctgggaacagacagcgcgaagcaggaactttctgctgggcttatgaagatgatcgacacgaagggtgtggaagaacagatatccacggcaatcggaacctatatgcagagtgcattttcttcttatggaaatactctgtcacaggcactgggaacacagatttcgaaggcgatggggcagataatgacacagatcgccggagggatggaacaagtcatgactcagacgatgcgtcagctgggagaaaatctgcagaatgcattttctattgatgcggatgcatttaccggggcatttgatataagcatggatggagaagaactgaccgaactgatgatgtccatgggaaataccggaagtacaacgtatgattcgaacctgcagaaactcggctatgcagataaggcagaaccgagtggtatctcaatctatccgaaaaactttgagagcaaggaacagatcgtgcatctgctggatgattataacagtaagatggaaagagaaggaaaagacgagcaggtgatcagctacacagatatggtcggaacgctgatgtcctcggtgacggatattgttgatattatcagttatgtgctgattgcgtttgtggcgatctcactggtggtttcttcgatcatgatcggagttattacctatatcagtgtgctggaacgccggaaagaaatcggtatcctgcgggcaataggagcatctaaaggaaatatttcccaggtgttcaatgcggaaacctgtatcatcggtctgtgtgcaggtctgataggtatcggtctgacactgttacttctgattccgggcaatgccctgattcacaaactggcagataccactgctgtcagtgcatccctgccggtgattccggcacttatcctgatcgtgttgagcgtatttcttacgtttatcggtggactgattccgtcgaagaaagcggcaaagagtgatccggtgacggcactgaggaatgactaagtggattgatgaaaacctgagtgtaatcagtcagttcaatagagccggtatttcttatcaaaatataagaatactggctcttttaagatttcattccgccccataagatgttataatgtatctcatgaaaaatcagatcatatgtcacagaaaaaggaggaatataaatggaatacaaaacacttggaaaaaccggattaaaggtttcccgcatgggatttggcgggattccgattcagaagattgatgaagagggaacaagaaagctgttgcaggatatggtaaagcggggaatcaattacatcgactctgcacggggctacactgtcagtgaacagtatatcggctacggtctggaaggaatccgggatcagttcgtgctggcaacaaaatccatggcgagaacaaaagaagcgatggcagcagatatcgagacgagtcttcggaatttccgcacagactatattgatctgtatcaggtacataatccgagtatggaacagctggatcaggtgatcggagaaggtggggcactggaagcactgctggaggcgaaaaacgctggaaagatcggacatatcggaatcacggcgcattccacggaagtttttgagcgtgcgctgaccctggactgggtggagacgattatgtttccttataatattgtggaacagcagggggctgaactgattcgtcggtgtggagagaaaaacatcggatttattgatatgaaaccactggcaggaggtgccatcgaagacggaactctggcactccgctatgtatgttccaacccggatgtgacgataactattcctggtatggcagagattcgggaactggaagagaatcagaaagcctgtgagaatcaggaaccgctgacgaaggaagaagaggaaaagattcaggcagtccgtgaccagctgggaacggatttttgtcgtcgttgtaattactgtgcaccttgcagcgtaggaatccagattccaagtgtttttttgtttgccggttatctgcaacgttatgatctggagcagtgggccagagatcgatacagtaccttaaaagtaaaagcttctgcctgcatcggctgtggcaaatgcgaaccacgctgtccataccacctgccgatccgggaaaaactgaagatctgtgcagctgattttggggaatagagagaatcagattacggtgaaggagaaaaattatgacacgacgggaaagagaagtaactgatatcaatgatatattacagatcatcaacgaaacaaagatcctgcatctgggtttgtctgatgagggatggccttatgtggtgccgatgaattatggatatgaatatgtggacggaaagctgacattttatctccatggcgccaccaaagggtacaaatttgatgttctggagaagaatccaaaagtctcatttgctctggagacagatatgattccgtttgagggaaaggtagcctgccagtacgggatggcataccggagcgtgatgggacgcggatatggaaccctggtggcggatgtggaagaaaaggaaaaagcactgtccctgttgatgaaacagcagacgggaaaggattttacctttgatgagaaactggtatcaattgtgaatgtaatccgtattgatgtgaaagaatttactgcaaaggagagaaaacttccggcaacgatgcagcaggattcctgaaaataattgaattattgaaggttatagagaaagattcatcgttaccgggaacggagtgaacagtaacacttaatcccaagcactagagcgtgtctgaaaaatcatttccgcaacctgcaagccccactttgcggtatattttacccttattcggttgccgtagcccgctacgccgccctcattcggataaaatctcccacaaactgggactcgcagctcacgaaaagcctttttcaaacacgctctagtatattatgcagaatagatatggaattcgagttgaaattatgataaactaaactgtaatgttttgtcagtttttgtagttgtatctattacggttatgatttgataaaacaatcgatctaaaaggtcgcagacacagctgtgatggagtagcggcagtgtcagaaaaacagatgaggagtgaagacatgatagcactgattgattacgatgcgggaaatatgaaaagcgtggaaaaagctctgcagctgataggagaggatgtgctggtgaccagagatccgaaagagattctggctgcggataaagtggtgttaccgggtgtgggtagttttggagatgcgatggaaaatctgcaccatttcgggttggtacccgtgattcaccaggtagttcaggagcagactccgtttttgggaatctgtctgggactgcagcttctgtttgaaaaaagtgaggagagtccgggcgtggagggccttggcatcttaaagggagagattcttcggattcctgcggcagaagggctgaagatccctcatatgggctggaataatatccgatttccgaataaaggacggttgtttgcgggagttccggaagatgcatatgtgtattttgtacattcctattatctgaaagcacaggatgaaaaaattgtgactgcaacaaccgaatatggtacccatatccatgcttctgtggaaagcggcaatctgtttgcctgtcagttccatccggagaaaagttcccatgtgggcttgcagattttgaaaaattttgcaaaactggaaggaaaaggaggacgataagatgctgacaaaaagaattattccatgtctggatgtaaataatggaagagtagtaaagggcgtgaactttgtcaatcttcaggatgcgggtgatccggtggcagtagcgaaagcgtacgacgaggccggtgcagatgaagttgtttttctggatatcacagcatcttcggatcatcgtaatacagtggtagatatggtgcggaaagttgcggctaacgtatttattccttttaccgtaggaggtggtatccgcactgtggatgattttcggttgcttttgcgggaaggagcagacaagatttccatcaattcttctgcgataaaccgcccggaactgattcatgaagcagccttaaagttcggaagtcagtgtgtggtagttgctattgatgcaaagcagcgtgcagacggctcaggatggaatgtctataaaaacggtggtcggatcgatgtgggtctggatgctgtggaatgggcaaaaaaagcagaagctctgggagcaggagagattcttctcaccagtatggatggagatggcacaaaagcaggatacgatctgaaactgacccgtgcgatcgcagatgcagtatccattccggttattgcttccggtggtgcgggctcgctggagcacttttatgacgcattgacagagggcggtgcagatgccgcactggcagcgtctctgttccattacaaagaactggagatccgggaagtaaaggaatatcttcgggacagaggacttccggttcgtctgtaaagatatcggcaatataagaaaatacgtaactgttcagtaccttcacagctacgaaaatacaagtgtgcgtgtaaatccggtaaaatccggatacaggaagattgccattgcacgcacaagagaggaggagggcgtatgcctccaatttcaggagcatgggcaaaagccctggaaggggaatttcacaaaccctattataaaaaactatttgaaactgtggaaaaagaatatgcaacccatcagatttttccggcgggagatgatatttttaatgcgtttcattttacaccgctggatcaggtgaaagtagtgattctcggacaggatccgtaccacggagacggacaggcgcacgggctttgtttttcggtaaaaccggatgtggagattccgccttcactggtgaatatctacaaagaactggaagatgatctgggatgttatatcccaaacaacggatatctggaaaaatgggcaagacagggtgttctgatgttaaacacagttctgaccgtacgtgctcatcaggcaaattcccatcgggggatcggctgggaagaatttaccgatgcggctattcgggtgttggcggcgcaggatcgcccgatggtttttatcctctggggcaaaccggctcagagtaaaaaatccatgcttgacccggacaaacatctgattctggaggctcctcatcccagtccgctatccgcttaccggggattttttggaagtaagccgttcagtaagacaaatgcttatctgacagcacatggtctggagccgattgactggcagatcgagaataggtagttcggctatagaagacagatcaggtatttgccgggatttttccatgaaagccggaaaaatcgaaaaagagataaagcaggagtaaatgatgagtgagaaaaatggattagtgaaaaacgcctcatttctgatgatggcgactttgatctccagggtgatcggtcttttgtatcgaagccctctgggggttgtgctgggaacggtaggacttggatattatggatatgcgaataacgtgtatgttattttgcttctgatttctgcctacagtattccgatggcagtatcgaaggtcgtatcggaacgtctggcactgaaacaatatcgaaatgcccagaaagtctttcatggggcgttattatatgcaatgatcgtgggtggagtggcagctctggttgcctttttctttggtaattatctgctgccggtcaatcagcagcaggcacttctggctttgcggatgctggcgccgacaattttcttttcagcaattcttggcgttatgcgtggatattttcaggcgcacagcacgatgatgccaacctcgatctctcagattctggagcagatcgccaatgcgatcatcagtattctggcggcatggctgttgatcaagaagtttgcagtggacgaggagacgcatgcgatttatggtgcagccggtggtgcgatgggtaccggagccggtgtgctgaccggtctggcatttatgttgatcgtctatgcggcaaaccggaaatcaatccataaaaagatcgccagagataaacatacacaggaagagtccatggtgggcgttatgaagatcattttcctgatggtaacgccgattattttcaatacttttgtatacaatgccagcagttacctggattccaagattttctcggatatcctgaatatgaaaggcatcgctgcaaaagtagtcagtggccagtggggagaatacagtaattactacattacgctgatcaatattccgctggcactttcaagtgccacttcctctgcgatgatgccggagattgcaacgagatttatcaaaaatgagtataaagaggcaaatgaaaagatcaacgagggaatccagctgacgatgtttttgtgtatcccggcagcagtcggtttggctgtgctggcgtttccaatcacaaaagtgctgtttccatccagtggaatactgtcgggacagctgcttttagcaggttccataacggttattttctccgcactgtctacgattacgaacggagtgttgcaggcaatcggtaaagcgagaattccgcttcgaaactctgcgatttctctggtgctgaatgtgatcactgtggcggtatgttcttttgcagctccacagatgggcgtgttctctgtattgatcgccagtctggtatttgcagtcgccatgtgtgtattgaatgccatgtccctgaaaaaatatctgggtcacaagaacgattttgtcaacggctacggaaaaccactggcagcggcagcaggtatgggtgttgtggcatggatcgtatattacggactacatcttctggtgccgatccgtatcgtgtgtctgggtgtttctgtaattctggcagcactggtatatctgattttgtatgtgatcgttacgaaaacaacggtggaacagatgcggcggttcccgatgggaaattatgtggtgaaagtgctacggatcctgaaagtattccgataaagacaggaatgggatttccctgaaataaagtaattcgagtatggctggtagattctgtacagaacgccagctttgctttgttttctatacagataatgaagctgcaattgtaactattcagcagccattatcccgcgaggtgttttggcatatttatgccaaaatcccgagacatacaagcaaaaatgccatcaccgaaggtgattttaaatgcgtttttgctcgtaactgtgaaggtactgaatagttacctgcaattaatgaagaatagaacagaaatgatttgtgtaatggaagaaagaaggatattacaatggaagaaacacagagaccatgtaaaagggtagtggattctcagacggagcagacgtatctgatgcgccccaattatctgaactgttatggaaatctgttcggaggacagctgatgggctggattgatgaaattgccagtatcgtggcgatgcgtcactgcgaggcggacatcacgacagcggcgatcgataacctgaatttcaaagagggagctactgtaaatgatgtagtagttcttcggggaaagattacgtatgtgggaagaacttcgatggaagtacgtgtggacacatatgtagaaagtcgtcacggtatccggaaggtgatcaaccgtgcatatgtggtaatggtagccgttgatgaacaccatcacccgattccggtcccgggactgatcgtcgagtcggaaaatgacagggcagaatgggaaggcggagaaaaacgatataggttaagaaaacagcggagaaaagaaggattttaaaaagaaaatgaaaatggctgaggaaacgttctatggcgaatcctcagccattttcattgcaaaaaatgatctgtaatgtaatgagcgttagcgatccagaagcgtgctggcacggttatggggagcggcgaatggcgatcatgaacgaagttcatgatataatgattttcgcagatccattgttctgcttttacttcatattcttcacagccgtagacagcatcagtttgatacggttcagctggtttacttcagaagcgcccggatcatagtcgatggctacgatatttgcctccggatggcttctgcggatcgctttgataacacctttaccaacgatgtggttcggcaggcatccgaatggctgagtacaaacaatattctgtgtaccgccatggatcagttccatcatctcaccggtcagaaaccatccttcaccggtctggttacccatggatacgatcggtgcagccatgcgggccagatccgagatatttgccggcggatcaaagtgacggctcttcttgaattcttcggtagcagcacttcgcagccagttgatggcggcgattccggcatttccggtgatagtggaagtcttcttaaagcccagtttctcgtgcttaaagttctggttgtagaaacagtagcacatgaaatcaaccagatccggaacgacagcctcggcaccttcctgttccagaagctctgccagatgattgttggcagcaggaaggaattttaccaggatttctcctacgataccgactttcggtttctttaacttctcatcgatcggcagacggtcaaaatcatggatgatcgtacggcagatctgtttgaaccgggtatggctcagatgtttgccggatacaaaatcgatacagattttttcccattttctatgtaagcggtcggtggatccttttttgatttcataaggacgcatgcggtatacacatttcatcaggatatcaccgaagatacatccgtaagccagtctgcgtgccaggccgggagtaatcttgaagccggggttgctctccagaccgctcaggttgatggagattaccgggatatgttccatatccgctttattcaatgcacggcggatgaatccgatatagttcgaagcacggcatccaccaccggtctgtgacatgatgatcgctactttgtgcaggtcgtatttgccggataacagcgcctgcatgatctgtccgacaaccattagggacgggtagcaggcatcgttatttacatatttcagtcctacatcgacggcctctttgttatcattcggaaggacttccagatgatagccgctggcattgaaacctgcctccaggatattaaaatgcatcggagacatctgtgggcagaggatggtgtagtcttttctcatctcttcggtaaacggtacacgtttgatggaagacggccggatcacacgtttttcctgctgtttctgtctggtgcggatggcagccagcagagaacggacacggatacgtgcggcaccgaggttgttgacctcatcgatcttcaggcaggtatagatttttccgctgttggagagaatttcctgtacctcgtcggtggttacggcatccagaccacagccgaaggagtttaactggatcagatccagatcgtcgcgttctttgacaaagtttgcagcagcatataatcgggtatgatacatccactggtcattgacacgaagcggacgctccagtggtgccagatgagaaacagagtcctcagtcagtacggcgattccgtaggaattgatcatatccgggataccatgatgaatctccggatcgatatggtacggacggccggcaagaacgataccgcgtcttccggtttcttccatatagcgaagggtttcttctccctttctgcggatatcgtttctcatatgctctagttctacccacgcagcatgtgccgcttccagaacttcttctttcggaagatcggagaattcctccaccaggcgctttgtggctgtctcttcattggtcagagccaggaacgggttgcggaagatgatggatggatcatttaattcatctacattatttttgatattttctgcataagaggttacaatcgggcagttgtaatggttgattgcttccgggaactcggtacgttcatatggaatacatggatagaagataaacttcacaccctgacgaagcagccaggtcacgtgaccgtgtgccagctttgccggataacattcggactcactcggaatcgattcaatacccagttcgtagatcttacggttggaagtaggagagagtaccacctgatatttcagcttcgtaaagaaggtgaaccagaacggatagttctcgaacatattcaggactctcgggatacctactttaccgcggacagcctgatcggcatcaagcggtgtgtaaccgaagatttttttgtatttgtaatcaaacaggttcgggatattttctttatttttctgctttccgataccacgttcgcaacggttaccgctgatatactggcggccgccggagaaacggttgatggtcagacggcagctgttggtacatcctttacagtttgccatgctggtcgtgtatttcagatcgttgatcttgtcgatggagagcatcgtggtatctttgccatcctcaaaacgctctcttgcgatcagggctgcaccgaacgcacccatgatacctgcgatatccgggcggatcgcttcacagttggcgatcttttcaaagcttcgaagtaccgcatcgttatagaacgtaccaccctgtacgacaatattttttccaagttcggaagcatcggatactttgataactttgtacagcgcgttcttgataacagagtaagccagaccggcggagatatcagcgacggaagcgccctctttctgtgcctgttttactttggagttcatgaatacggtacatctggtaccaaggtcgatcggattttctgcaaataaagcggctttcgcgaaatcctgtacgctgtagttcagggattttgcaaaggtctcgatgaaggaaccgcatccggaagaacaggcctcatttaactgtacgctgtctacggtgtgattcttgatcttgatacatttcatatcctgaccgccgatatcgaggatacagtctaccttcggatcaaagaaagcggctgcataatagtgagatacggtctcaacctcgccctcatccagcatcagagcggctttgatcagtgcttcaccgtaaccggtggaacaggagtaagcgatccgggcagtatccggcatctggaaatagatttcctgtacggcacgaatcgtggttgccagcggatttccgttgttgttgtcatagaacgaatacagcagggaaccatcctcgccgaccagagcggcttttgttgtggtggaacctgcatcgataccgaggaaacagttgccttcgtaggaatccagatcaccggtcgctacattgtactggctctgtctctcattaaaggcatcgtaatcttcctgagaagcgaacagcggttccatacgtgcaacctcgaagtccagtttgatggactgtgccatacgctctttcatggctgtcagggataccgtaacatcctcttttgcattcagtgcagaaccgatggctgcaaacagatgggagttttccggtacgatcgtgtgctcctcatccagtttcagagtacggataaaggcctgttttaattcggacaggaaatgcagcggaccgccaagaaatgcgatatgaccgcggatcggttttccgcaggccagtccactgatggtctggttgacaactgcctggaaaatagaagcagacaggtcttctttggtagcaccgtcgttgatcagcggctggatgtctgattttgcaaatacgccgcagcgggctgcgatcggatacagagcctgatagttttttgcatattcgttcagtccggtagcatcggtctgtaacagggaagccatctggtcgatgaaggatcctgtaccaccggcacagataccgttcatgcgctgttcgatgttgccgccctcaaagtaaatgattttggcgtcctcgccgccaagctcgatggctacatctgtttttggggcaagttcctgcaacgaggaagaaactgcaattacttcctgtacaaaaggaacttccagatgattggcaagagccagtccgccggaaccggtgataaccggatgcacggtcatctctcccagttcatcaatggcttttgatagaagggaagccagagtttcctgaatattggcaaaatgccgttcatagtcagcaaacagaatctgatgagactcatccagaatggcaattttaaccgttgtggaaccgatatcgattcccagggtataatttggtgtgttgtttgttgtagcagtaataactgccacctccttttctgtatgtatatgtaactattcagtagccactgtcccgcgaggtgttttgacatgaatatgtcaaaatcccgagacatacaagccaaaatgccatcaccgaaggtttaaatgcattttggctcgtaactgtgaaggtactgaacagttacatgtatatgagtaaccgttcctgagtttcaacagttacataggtgtctgcgtgcattccgttattcatggaaagaaaacagatggaatgccacaaagggattactttctacgaatcctacatcctgtcagatatgaaaactgtcatataaacagttacatatttaaataggaacatgtccgaaaatccggactgacttattatatgacatttattggaatatggcaatgtagaaaaaagagataatctttaaaaaaagagaaaataattgtgaaatatttattgaaaaaaaaggcggaaacagatataataagcggtactgtatgaaagaacatgggcattattgaagaaaaaagcaatgatgttttaaaatcagaggatcagaaaaactgaacatatggatcatataccggaacatccggtaaaagaaaagagaaaggtgataaaaatatgtataagatcatagccagagatggaaatgcaaaacgtgcagaattccagaccgttcacggaaccatccagactccggtatttatgaacgtaggtactgccgcagctatcaaaggagcagtggcgactacagatttaaaagaaatcggcacacaggtagaactgtccaatacctaccatctccatgtgcgtccgggtgataaaattgtaaaacagatgggaggcctccataaattcatgaactgggatcgtccgattcttacggattccggcggatttcaggtattttccctggcaggtttaagaaagatcaaggaagaaggcgtaactttccgttcccacatcgatggtcacaagatcttcatgggaccggaagagagtatgcagatccagtccaacctggcttccaccattgcgatggctttcgatgagtgcccgtccagcgtggcagaacgaagctatgtggaggattccgtggcaagaaccacccgttggctggcaagatgtaaaaccgagatggccagactgaacagcctggaagatacgatcaataaaaatcagctgctgttcggtatcaatcagggagctatctttgatgatatccgtatcgatcacgcaaaagcgatcagtgagatgaatctggatggttatgcggtaggtggactggctgtaggagaaagccatgaagaaatgtaccatatcctggatgtgaccgtacctcatctgccactggaaaagccaacgtatctgatgggtgtcggaaccccggccaacattctggaagcagtagatcgtggtgtggactttttcgactgtgtatacccgagccgaaacggccgtcacggacatgtatacacaaaccagggaaagagaaacctgttcaatgccaaatatgaactggatcagcgtccgatcgaagaaggatgtcagtgtccggcctgccgaaattacagccgcggctatatccgtcatctgttaaaagcgaaagagatgctgggtatgcgtctctgcgttctgcataatctgtatttctacaacacaatgatgagcgagattcgtcaggccatcgaagaaggcagatacaaagaatataaaaaacagaagctggaaggtttcctggaaaacgacaaaaagtaaaaaaacaataaaaatatcaaaaacagcttgatggaacccctgtttttgtgtatagtagtaataacgtccgtaaacggaaaagaaaaagcaggaggaatgtgcaatgggagtagtaatgacttcaacacaggcagcaggagcagcaagcactatctatatgatcgttatgctggttattatgttcgctctgatgtattttttaatgatccgtccgcagaaaaaagaacaaaaacgggtcacagccatgctgaatgatatggaagtaggcgatgcaatagttaccaccggtggtttctacggagttatcatcgatatcaccgatgaagatgtaatcgtagaattcggaaacaacaaaaactgccgaatcccaatgaaaaaagcagctatcgcagaagtagaaaaagcatctgaagcaactgcataaaatgacataagcaagataaacaaaacgaccaatcaggttttcaacagagaacttggctggtcgttttttctttttatgtgacaaagaaggcaaaatcaatatttttatagaatattgaaaagctttaatgatcaggaaatagagtatttgtcaatgtcagccggaaaggagcagggacagggtgtggtggcattttgcacgctgccgccacaccctgtccctgctcctttccggcgtccgttcccaataccccctcaactttcccttgaaaataccatgaaaatagattatgatagtctgtaacagattaaagaggtaaagaaagaaaggatgaaacgattatgaactacaaaattgcattaattcacggagacggaatcggtcctgaaattgtgaatgaagcaaaaaaaatattagataaagtatgtcaggtatacgggcacacattcacatacaccaacgtactcctgggtggtgcatccatcgacgtacacggtgtcccgctgactgatgaagctgtcgcagaagcaaaatccagcgatgctgttctgatgggatccatcggaggagacgcaaaaacatccccgtggtatcagttagagccatccaaacgcccggaagcagggcttctggcgatccgtaaagctctgaacctgttcgcaaaccttcgtccggcatacctgtatgatgaactgaaagctgcatgcccgttaaaagaagatcggatcggtgacggatttgacatgatcatcgtcagagaactgaccggaggtctttacttcggagaaagaaagaccgaagaacaggatggtgtgatgacagctgtggataccctgtcttataatgaaaaagaaatcagaagaatcgctgtcaaagcatttgagatcgcgatgaagagaagaaagaaagtaacaagcgtagacaaagcaaacgtactggattcctcccgtctgtggagaaaaatcgtagaggaagtagcaaaagactatccggaagtaaccctggaacatatgcttgtagacaactgtgcgatgcagctggtacataatccgggtcagtttgatgtcattctgacagagaatatgttcggagacatcctttccgacgaggcaagtatggtaaccggatccatcggtatgctttcctccgcaagtctgaacgagacaagctttggactgtatgagccaagccacggttctgcaccggacatcgcaggaaagggaattgcaaacccgatcgcaactattctgtccgcagcaatgttacttcgttattccctgaatctggacaaagaagcagatgcagtggaaacagctgttcaggcagtcttaaaagaaggataccgtaccggagatattatgtctgaaggatgcacacaggtaggaaccgtacagatgggtgacctgatcgcagaacggattcactaaaactgaatgggaaaacagaaaggaagcgtaacgaatatgagaagtgatgcagtaaaaactggaatgcagcaggcacctcaccggtccctgtttaacgcactgggaatgacaaaagaagagatggagagaccgttagtcggtatcgtaagctcttataacgagatcgttcccggtcatatgaatctggataaaatcgttaatgcagtaaaacagggagttgccatggcaggcggtacgccgatcatgtttccggcgattgcggtctgtgacggtatcgccatgggacatatcggaatgaaatattccctggtaacccgtgacctgatcgctgattccacagaagcgatggcgatggcccatcagttcgatgcactggttatggtgccaaactgtgataaaaatgtaccgggacttctgatggcagcagccagactgaacgtaccgaccgtatttgtcagcggtggtccgatgcttgcaggtcatgtacacggtcagaaacgaagtctgtccagtatgttcgaggcagtaggatcctacgcagccggaactatgacagaagacgatgtggaagaatttgaaaataaagtatgcccgacctgcggttcctgttccggtatgtatacagccaacagtatgaactgtctgaccgaggtactgggtatgggacttcgtggaaacggaaccatcccggctgtatattccgaacgtatcaaactggcaaaacatgccggtatgcaggttatggaaatgtacagaaagaatatccgtccgagagatatcatgacaaaagaagcagtcatgaatgcactgactgtagatatggcactgggatgttctactaacagtatgctgcatctgccggcaatcgcacatgaaatcggatttgacttcgatatcactctggcaaatgaagtaagtgctaaaacaccaaacctgtgtcatctggcaccggcaggaccgacttacatggaagacctgaacgaagcaggcggtgtgtatgctgtcatgaatgaattatcaaagaaaaacctgctgaatctggattgcatgacagtaaccggaaaaacagtaggagaaaatattgcaaactgcgttaaccggaatccggaagttatccgaccgttagacaatccatacagccagaccggaggacttgctgttctgacaggtaatctggcaccggacggtggtgttgtaaaacgcagtgctgtctgcgaagaaatgatggtacacgaaggaccggctcgtgtatttgaatgcgaagaagatgctattgcagccatcaaaggcggaaaaattgttgcgggtgatgttgttgtgatccgttacgaaggaccaaaaggtggtcccggcatgagagaaatgctgaacccgacttccgcaatcgcaggtatgggactgggatcttccgtagcactgatcacagacggacgattctccggagcatccagaggagcttctatcggacacgtatcaccggaagcagccgtaggcggaccaatcgcactggtagaagaaggcgacatgatccgtattaatattccggaaaccagtctggaactgctggtatctgacgaggaactggcaaagagaaaagcaaactggcagccgcgtgagccgaaagtaacgaccggatatctggcacgttatgcagctatggtaaccagcggtaaccgtggtgccattctcgaagtaccgaagaaataatttaggaggaaagactgatgcagcttacaggatcagaaattattattgaatgcctgaaagaacagggcgtagacaccgtattcggatatccgggaggaacgattctgaatgtctatgatgctttatataaacacagcgatgagatccaccatgtactcacatctcatgagcagggtgcttcccatgctgctgacggatatgcccgtgctaccggaagagtaggtgtatgtatggcaacctccggtccgggagcaaccaatctggtaaccggtatcgcgacagcccatatggattctatcccgatggtagcgatcacagctaacgtggcaacaggacttctcggacgtgacagcttccaggaggttgatatcgccggcgttgttatgccaatcactaaatatagtatgatcgtaaaagatatccatgaccttgcacctgcgatccgacgtgcatttaccattgcacagagcggaagaccgggtccggtacttgtagatgtgacaaaagatgtgacagcagctgttacagaatatacttatcaggagccgacaccgatcgctccgtatactgccgagatgctggaatctgacctggatcaggcagcaaaactgatcagcgaggcagaaaaaccattcattttcgtgggcggtggcgcgatcacttccggagcagcagaagaactgcgcaaatttgcacacaccatcaattcgccggtaacggattctctgatgggaaaaggcgcattttccggagaagacgaactgtataccggtatgcttggtatgcacggaaccaaaacatccaacctgggtgtgacaaagtgtgatctcctgatcactgtgggagcacgtttttctgaccgagtaaccggtaacactgcaaaatttgcacagaatgcaaagatcatccagatcgatgtggatgccgcagagatcaacaaaaacattaaagtagactgcagtatcatcggcgatgttaaagaagtattaaaagaattaaacaaaaagatccatccgaagaatcacgatgcctgggtgaaagaagtggaagatatgaaagcaaaatatccgctgaaatataaccaggaaggtctgaccggaccgtatgtcatcgaagaactgtatcgtgtgacaaaaggtgatgcgatcgtcgttaccgatgtgggacagcaccagatgtgggctgcccagtattacaaatacaaagaaccgcgtactctgatcacttccggcggactgggaaccatgggttatggtcttggagcagcaatcggtgcaaaattcggtcgtccggataaagtggtagtcaatatcgcaggtgacggatgcttccgtatgaacatgaacgaagttgctacggcagcaagaaataacctgccgcttatagagatcgttattaacaatcacgttctgggcatggtgcgtcagtggcagactctgttctacgatcaccgttattcaagcaccatactggatgacaaagtagattttgtaaaatttgcagaatccatgggtgcagttggcatccgtgtgaccaaaaaagaagaagtgggtccggcgatcgaaaaagcaatcgcactgaacacaactgttgtgctggactgccagatcgactgtgatgataaagtattcccgatggttcctgcaggagctccgatcgaggaagtctttgatgctgaggatcttgcgaagaaagaaaaataggaattaataaataaagcaaacctgatacattaaaatatatatctggtttgctttattgctataaaaatatatttaacagaattttgatattgacaataatttatcagaggtgtatagtgtttcatatgttagcacactaaagtgctaatgggaaagaagaaaaaggatagctgtttagctggcatatgcgaaggtgctgaacagttatgaaaatgtgagaaagaggaggaaactaaggtgagtagagtttacaatttttcagcaggtcctgctgtactgccggaagaagtgctgaaagaagcacaggcagagatgttagattataaggatacaggaatgtctgtaatggagatgagtcaccgttccaaagcttttgatcagattattcaggaagcagaaaaagatctgagagacttgatgcacattccggataactataaagtgttattccttcagggcggagcatctctgcagtttgccatgatcccgatgaacctgatgaaaaacaaggttgccgattatatcgtaaccggtcagtgggcaaaaaaagcatggcaggaagcacagaagtacggaaaagcaaacaagattgccacttccgaagacaagacattctcttatatcccggactgttccgatcttccgatcagcgaagatgcagattatgtatacatctgtgagaataacacgatctatggaacaaaattcaaaaaactgccaaataccaaaggaaaagatctggtggcagatgtttcctcctgtttcctgtctgaaccggtagatgtaagcaaatatgcaatcatctacggtggtgtacagaaaaatatcggaccggccggtatggtcatcgcaatcgtaagagatgacctgattacagacgatgtattgccgggaactccgaccatgatgaaatataagacacatgctgatgcaaattctctttataatacaccaaactgttactgcatctatatctgtggtaaagtattcaaatggctgaaaaaacagggcggtttggaagcaatgaaagagcgcaatgaaaagaaagccaagatcctgtatgattatctggatgaaagtaaactgttcaagggaaccgtagaaaaagcttcccgttctctaatgaacgttcctttcgtaacaggagacccggatctggatgcaaagtttgtaaaagaagcgaaagaagcaggtctggagaatctaaaaggacacagaactgtcggtggtatgcgggcaagtatctacaatgctatgccgattgaaggggtggaaaaattagtagagttcatgaaaaaatttgagaaggagaatctgtaagatgtttcagtatcaatgtctgaatccgatctccaaagtgggactggatggatttacaaatgattacacaaaaactgaagaaatagaaaaagccgatgcgattctggtaagaagtgcttcgatgcatgagatgaaattaccggaaaacattcaggctattgcccgtgccggagccggtgtcaacaacattccgttacaggattgtgcagagcagggtatcgtcgtattcaatacaccgggagccaacgcaaacggtgtcaaagaaatggtaatcgccggcatgctccttgcatcccgtgatatcgtaggcggtgtggaatgggtaaaacaggaaaaagataacgaaaatgttggaaaactggcagaaaaacagaaaaaacagtttgccggctgcgagatcaaaggaaagaaactcggtgtcatcggtctgggagccatcggagcaatggttgccaacactgcgatttatcttggtatggaagtatacggatatgatccatatatttctgtagataccgcatggaagctttccagagagatcaaacatatcgccaatgtggaagatattttcaaagagtgtgattatattacccttcatgtgccgcttcttgacagcacaaagggcatgatcagcaaagacagtatcgcaatgatgaaagacggtgtggttctgttaaacttctccagagaccttctagtggatgaaactgctctgatagacgcgctggaaataggaaaagtgaaaaaatatgtcacagattttgcaaaccccaccgttgcaggcgcaaaaaatacactggtaacaccacatctgggagcatccacagctgaatccgaagacaactgtgcatgcatggcagtcaaagaactgagagattatctggaaaatggtaatatccataattctgtcaactatccaaactgtgatatgggtatctgtggtgtggccggaagaatcgccatcaaccataaaaatgtagtaaacatgatcagccagttcgcaacagtcctgggtggagcaggtatgaatatctctgatatgaccaacaagagcaaaggagattatgcatataccctgatcgatctggagacgccggcaacacaggagatcatcgacaaattagacgagatcgagggcgttctgaaagtcaggataataaaataaatagaaaataaaacatgccggagcgtgtctgaaaaatcatttccgcaatctgcaagccccactttgcggtatattttaccctcattcggttgccgtagcccgctacgtcgccctcattcggataaaatctcccacaaactgggtctcgcagctcacgaaaagcctttttcagacacgctctagtgcaggaagaagaaaggagagtcgttacatccgaaaggacgaaacggctctcttttcatgatgaagaattacttaagattcagtgcaatatatattccgattacttcttcttacgattgtatttcaagtatgaaaatggtatgatagatttaatatatgaaaaattgtaactgtgaaggtactgatcggttacgaaatcgcaggaggtaggggtttatgtctgacaaattatatgaattgatggattggccggaaattgaggcagttgtatattctgaagaatatgcgccgagagagatcctcggaccacatgtaaccggtgacggagtgctggtacagtgcttttttccgggggcggacaaagtaacggtgaaaataacaaaagacggcagagagtatccgatgagtaaagaggacgatgcaggatattttgctgtattactgagcgggagaaagattccggagtatacctatctggtggagcaggagggggagcagatcgagtgctatgatgcatatgcgtttccctgtcagatcacactggaagaagaacagaagtttatcaatggtatctgctatgatatttacgaaaaactgggtgcacatccgatgactgtcaatggtgtggatggtgtgtattttgcagtctgggcaccgaatgcggcccgtgtcagtgtggttggagattttaaccactgggatggcagagtataccagatgcagcgcctttcggtatcgggaatctatgagctgtttatcccacagattccggtagggtctctgtataagtatgaactgaaattaaaagacggtctgacttacctgaaagccgatccttatgcaaaccaggcagaacttcgcccggcaactgcttcggtggtggcagatcttacacagtatgtctggaaagatcagacatggatgaaggaacgaaaaaagattcagacagaggatgccccgatgttcgtctatgagatgcatctggcatcctggaaaaaaccggaagacggaagagaattctataattaccgggaacttgcaccgatgatcgtggcttatgtcaaagagatgggatatacacatgtggaactgatgccggtgatggaacatccgtttgatgcctcctggggctatcaggtgaccggctattatgcaccgaccagccgctacggctcaccggaagattttatgtattttgtggatacgctccatcaggcgggtatcggtgtgattctggactgggtaccggcgcattttccacgggataccttcggacttgccaactttgacggaacctgtctgtatgagcatctcgatccgagacaggggtatcatccacactggggcacactgatctacaattatggaagaccgcaggtgaaaaacttcctgattgccaacgcactgttctggacagaaaaattccatgcagacggtatccgctttgatgcagtggcttccatgttgtatctggactatggaaagaacgatggggaatggattgcaaacatctacggcggcaatgaaaatctggatgctgtggaattgttaaaacatctgaattctatctttaaaaagaaacatccggatgctcttctgatagcagaagagtccacagcatggccgagagtgacaggaagtgtggacacggaagatggtctgggatttgattacaaatggaatatgggatggatgaatgatttcgtcggctatatgagtaatgatccgtattttcgtggtgcacaccataacgaactgacattcagtatggtttatgcttacagtgaacggttcatgctgagcttatcccatgacgaggtggtacaccagaagggttctctgttggagaagatgcctggaaccgaggataaaaagttcgcaaatctgcgtgcggcgtatggcttttttatgacacatccgggtaaaaaacttctgtttatgggacaggaatatggtcaggtacatgaatgggcagaaaataaagctcttgactgggaagacctggaaaaaccggcacacagacagatgcagaactatacgaaagccctgattcagctttataagacgcatccggcactgtggaaactggactatgatcccgatggatttgaatggatcaactgcgtggaatgggaaaagagtatggtgactttccttcgaaagtccaaaaaacaggaagatacacttgttgttatttgtaatttctcggatgttgcttatgaggaggaactggtaggtgttccgtatgcaggaaaatacaaagaaatcctgaacagtgatgcaaaagaatacggtggaaccggtgtggtcaatccacgtgtaaagattgcgaagaaagaagagacggatgatcgtccgtatacgatcaaagtaaaagttgcaccgttaagcgtagcaatttacagctttacaaaaacagcagcaaagacatctaccaacagaacggcaaaaacagcgaaaaagacagtcggaaaagcagaaagaaagatgctgtctgcaactgagaaaaaagaaggacttcgtaaagtcatccagcagaagctggagacggctgagaagaaaggtgcagaagagaaagaaaaacgtacagcaaaagaagcagaagctgcgaagaagccaaaagagaaaaagacggtaacagctaaaaaggagactaagacagaatgacgaatgcaataaaggcgctggctcagtggaaagggagtattccacaggacggacttcttgattttgtgctgaaagtcatcctggcgctgatcgtttattttatcggaacaaaactgatcggatggctctgcaaaaatctgcggaaacatctggtaaaattcggaagtgatgaggcagcaaaaagctttcttttatcaggaattaagattgggctgcatctgatcctgatcctgacgattgccggaaatcttggcgtggacaagacttcggtggctgcacttgtaggttctgccggcgtggcgatcagtttggctttgcagggtggcttatccaactttgcaggcggactgatcatcatgttcctgcgcccgttttccgttggcgattacatcatcgaaaatggggaaaagaccgagggaacggtacagaagatcgaactgtactacactacactgatgaccatcgacagccgtcggatcgtgatccccaattctgtgctgacaaacgacagtatcacgaatgtaacggcgatggaaaaaagaagactggagatcaaagtgggaatttcctatgaatccgacctgcttttggcaaaacagattctccgggaactgatcgaaaaagatccggaacttctggatcgggaagaaactcaggtttttgtggatgaactgggggacagtgcagtgatcttagggcttcgtgcctgggtaaaaacagaagaattctggaataccaagtggcgtatgaatgaacagatcaaactggaatttgataagaggggcattcggattccgtatccgcagatggatgttcatatgcaccggtgaaagggaaatataaagagtttacaaagtgtaaaaaaatattaagagaattgaaattgtattcttcgacaaatggtatataattatccagaaaaaggctatacttgcaaaacgcagacagagcgtggtgtgtatacagaaagggagtaaaagaataaaggggaatcatggcacaaaagaagggtaaaaaaagaaaaaagaagaaacagaaaaaagtaatcatcagcgtatatctttgcctgatcctgttgcttggagtggcagcagtgtatatatggagaagtaattattacaaaatccatttttataaagatacgtggatcaacggacaggactgcagcgataagacagcttcggaagtaaaggagcttctgcaggaaaaaatcagtgaatatacactgaacatcaccacgaaagaaggagaaacatatactgttaccggaccacagtttcatctgacgtatgtggatgacaatggtgtggatcagttactgacagatcagaaaccactggagtggattctccatgcgttccggggaggtaagtatgaagtatcggcgaataccacctacgaagaagatgcggtggaaccgattttaaaaagccttccgtttatgagccaggcaaatatggtacagccccgggatgcggcactacaggaaactgcagatgggtataggatagcccctgaggtggaaggtaatgcggtggatgaagaaaaagttatttctctggtacaggatgccatacaaaacggcacgacagaactttctctggtggatcaggactgttatctgaaaccggcagtgtatcagaatgatgaatctctgaacgaacagatgaatacgctgaattcgctgaccggtgcaaaactgacttatacagtgaaaggtaccgtatccacgattgatcatgaggtgttaaaatcctggcttgtacaggacgaaaacggcaattattctattgatgaatcgaaggaaaaggcgtttattgagcaacttgcggatcagattgatacctatggaaaatccagaaaatttacaactcacgacggtgcacagatcacactggcaaccaacagatacggctggcaggtagaccgggaaaaatccctggaaaacctgaaaacggcactggctgaaggaaaagagcaggagatggaactttcttacagccataaggcaaaaggaacaagtgataacgatcttggcgatgtctatgtagaaatcagcatcgacaggcagacaatgtggtgctacaaaaacggacaacttgtggtggagactccggtggttaccggtgatatatcaaaagaaggaagagccactccgaaaaacgggtgctggccaatcttctggaagaccacagaatacaccatgaaggggccaaaagatgcgaacggacaaccggaatatacggctttcgttcattactggatgccatttaacggtggcgtcggtattcatgatctggcgagtcgtggtaataattttggcggtgatatatataaaaccaatggctcccacgggtgtatcaatactccgctggaagctgcaaaaactatctacgagacagtatcggtgggaacaccggtaattgtatattaagcataaggaaaagcaggtttctgaacgataaggaaaaaaggattggaaacctggacggaaagtaaggagaccaactatgattgcacaggaatataaaaagatgttaggagcaaaatccgtaatccgtgagatgtttacttacggaaccgaacgggcaaaagagatcggaaaagagaatgtatttgactacagtctcggtaatccgtctgtgccggttccggaaaaatttacaaagaaaatgatcgaactgctggagacggaaagcccggtagcccttcatggatacagcccgagcctcggtatcgacagtgtgcgtgaggcggtagcggtatctctggaaaaacgtttcggtctgtcatataaaaaagaacatattttcatgtgctccggtgctgcagcagctctggcacatgcattccgtgcagtaactgtcccgggagattccatccttacttttgcaccgtttttcccggaatacaacccgtatgtcaatctgacaggagcaaagctgaaagttgttccgccggatctgaaaggattccagattgactttgaaaaattcgagaccatgctgacaaacgatgttaccgcagttctgatcaatacgccgaataatccgtccggtattgtatacaccaccgatacagtcagagaactggcgcggatcatggagaaaaaagcagctgaatacggtcatgagatatatctgatctcagatgagccgtatcgtgagattgtttttgagggtgtggacgcaccgtttatcgcgaagtattatccgaataccatcacctgttactccttcagcaaatcgctgtcccttcctggagagagaatcggttatgtggcagtgtcaccgagctgtaatgaggcggaaaccatcgtagatatgtgcggacagatttcccgtggtatcgggcataactgcccggcatccctgatccagcttgcagtggcagattgtctgtacgataccgcagaactgtcagtatatgagaaaaatgcaaatattctttatgatgccctgaccggtatgggatttgagatcgtacgcccgggcggaaccttctacatgttcccgaaagctccggaaccggatgcggttgcattctgtaagagagcaatgaagcaggatctgctgttagtgccgggtgataccttcggctgcccgggatatttccgtatggcttactgcatcgagacggagaaggtagaacgttctctggatgcattccgaaaactgtaaaagaaataagagaagatatagcaaaagaaaaggtggtggaacagagaagttccatcaccttttcttaaaagtcagtgactgttcagcagttacataacgaaaaaacgcccaccacctgaaaataaatggcgaacgtttctgaaaagctgaaaatgggacttgaacccacgaccccttcattacgagtgaagtgctctaccaactgagctatttcagcctgtgaatcaacacaaaagatattatatatgatttgtatggaaaaggcaagactttttgtgcattttcatggaactttttgaaaaaacaggaaaacttgttaaaatcagaagggaatgagaggataccggaaccggggttggactttgaaatatgtgaaagagtatgctataatgccagagtgaaaaataaagaataagaaggatgtcggaacagacagaaatgaggataaaaatgaaaaccttagtattggcagaaaaaccttctgtgggaaaggacattggccgggtgcttcactgtaccccgcagggaaacggttttttggaaggaaaggattatatcgttacctggggactgggacatctggtaaccttaaaagacccggaaggatacgataaaaaatataaagaatggaagatggaagaacttccgattatgcctaaaaaactggaaacggaagtgatccgacagacggcaaaacagttccagacagtgaaaaaactggtacagcgacaggatgtcaaagaaatcgtgatcgcgacggatgccggaagagagggagaactggtggcacgctggatcttaaaagaagcaagaaatcagaaaccgtgccggagactgtgggtgtcttccgtgacagacaaggcgatccgggatgggtttgcccatctgaaaaacagcaaagagtacgaccccttataccgggcggcggtgtcccgtgcggaagcggactggctggtcggaatcaacgccaccagagcactgacctgtaaatataacgcacagttatcctgtggtcgggtacagactcctacgcttgcgatgatccaggcgagagaaaatgagatccgacggtttgtaccggaaagttattatatgatcacagcaaaggcagacggtattacttttacctggaaagaaggaaaaacaggtagccttcgtacctatcagaaggagcgtgcccaggagataaaaaaggaatgtgagaagcacagtctgatcatcagaaagacagaaaagagagagaaaaaagtttatccaccgctgctttatgatctgaccgaactgcagagggatgcgaataaacagtttggattgtctgcaaaggaaactctgaatattatgcagcgtctctatgaaaatcataaagtacttacttatccaagaacagactcccgatatctgacttcggatgtcgtcggaaccttatccgagcgtctggatgcctgtgcggtcggtccgtaccggaagatggcactgacagtaaaagcacagcacccggagacgaaaaaatggtcttttgtggacaataaaaaagtatccgatcatcatgcgatcatcccgacagaacagtttgtggatctgacacatatgacaaatgaggaacgaaaaatctatgatcttgtggtgcgccgctttttaagtgcgttctgtccgccgtgcagatacgaagagacagttatttatgcagagagtggaagagaacagttcgttgccagaggaaaagtcatgatagacgaaggattccgtcaggtacaggagatgaactgtgaggatgaggatgagtcctcccgtgatatgaaagatcagacccttccgaaaatcagtcagggtatggagtttaaacaggtgcaggtggatatccgggaaggaaaaaccacgccgccgccacgatttactgaggcaacactgctttcggcaatggaaaatccggtaaaatacatggagaacaaagaccgtgagatggtaaaaaccataggagaaaccggagggctgggaacggttgccacgagagcggatattattgagaaattgtttcacacctttttgctggaaaagaaaggaaatgagattcatattacatctaaggcaaaacagcttctggagttagtgccggaggatctgaaaaagccggaactgactgcagagtgggagatgaagctttcaaaaatcgcaaaaggagagctggatgaccgtgcatttatgagtgagatccgcggctatacaaaagagctgctgcaggagatccgcagggaagagggaaccttccgccatgaaaacatgacaaataaaaaatgtccgaactgcgggaaacgattacttgccgtcaatggaaagaatgcgaaacttctggtgtgccaggatcgtgcctgcggataccgggaaactgtatcccggacaacgaacgccagatgcccgatctgccacaaacggatggaaatgatcggaaaaggggacgacagtatgtttgtctgctcctgcggacacaaagaacgcctttccaaattccaggagcgacggaaaaaagagggcggaggtgtatccaaacgggatgtgcatgcgtatatgaagaaacagcagaaagaggcaaaagaaccggtgaattccgcatttgccgatgcgctgaagaatatccggctgaactaggagggaaagatgcaaaaagaagatattcggttacgacaggtgatcatacatattatggattctacgatggggatgccggttctgtctgatcaggtgattgatttcggatcagatttcggggattttctgcgggcgcatattttccggctgttagagagcgatgatatgaaaaaatgttcttttgatgaagattctaaggtgcaggcagaactggaagcgtacaacgaagaaaactttatcccggtcagtcagaaactgggggaactgctttacggtgttatgaataaaaatattgacattccgccggcggatcttctggtggtagaatatgaggtggaacagcagcattttctggccctgttaaagatgaactataaaacgtattatacccacatgacggactctgatccatggggaaacagcaattctgtcatcaaacagaaggcgatcctgccgggagaaaatcagaaactggcagaggcggcactgattgatatgacagataaaaatctgaagatcatcgagaaaaaatatgatgtcaacggagtaaaaacaaattatttttctcagctgtttttacagtgccacggttctttgtcaccaaaatccaaactggcgatcgtggcaaaagcagtggacgatgtgcagaaaaagttttatcatgagtccgagcagtttgaggtgcagatggagacaaaaagtatcatcaatcaggcactggaagaagatgggggctttgccgtgccggtactgatcgataagattttcaaagaacaggaagagatgaaggaacaggtgattgaaaagctggataagtatcatctgacggagacggaagtggaaccgcagaatccggcgacaaccagaaaatacggaaaacagaacctgatcaccgataccggtattgagatccggatcccgatggaacagtatcagaacaaagataaagttgattttatcacgaatccggacggaacaatctcggtattaataaaaaatgtaggaagtattatcagtaaataaaagaataaataagagacaaagagggttatgagtgtgaagaaaaaaacagtgttgctggcgcttatgctggcgggagtcatgggactgtccggctgcaaaacctgggatgtggtctgtgatatactggctgtcggaacgacaaaagtggagaaggatgacggaccgaaagtagatcttgagggagagacaccggaggtaaaagatgatgacagtacggatctggaaacggcagacagtaaaataacttccggaaatgacgaaaaagagaaagacacaaaaaagaataccacaaaaggcagtgataggacggataaaaagagagtgacgatgccttccgggacaccggaaccaagtcatacaacgacgccgacaccaacaccgacaccgtccggaatagaaaagaaagagaaaagcggtcatatgatcacctgcacctctccggtcaacgtccgtgatgcggcaagcagtcagagccgtgtgatcggtgaacttgccaagggagatcaggtagaaaaacttggtgaagacggcggctgggtaaagatccgctatcagggtcaggaagcctgggtatacgaagagtatatgtcagagaagaacagcaggaaagaagaaacaaagacagaaaaatcgaaacagacagatcattctgccgataaaaaatcagaaacctacagttttgaaagtgatgagaaggtgcagacggattgacaggtttatcataagaatttacggagggcatgccttttggcatggaaaagactatggcgaaaaagagaatgacaaaaaaggaaagaatgcgtcagagaagacggagacagagaatgatgtttggcggtggattactgcttgtggcggttgtgtttactatgatcctgcttctgctcggttctaaaggatgcggaatatcaaaagcagagggagatgaggttgaagccgtaccgtctgcggaggccactgaggcgccgacggtcgaaccgacaccgacgccagagccggtaccatcggtcgacatcagcgatatcaacagtcggtccgggattctggtaagactttctgacggcaaagtggtggcagaaaaagatgcagatgcaaagatttatccggcatccatgacgaagatcatgacagcagttgtcggtctggaaaatctgtcggatcagaatgagacgatcacgatcgacagggatacttatgaccggttgtataccgaaggagcttctctggcaggcttcggagctggagatgaggtaaaggcaatcgatatcctttatggtgtgatgcttccctccggcgcggagtgctgtgtggggctggctcagcatctgtttggatctgaggaaaactttgtggcaaagatgaatgaaaaagcggcagaacttggcatggacagtacacattttgtaacctgtaccggactgcatgatgaaaatcattatacaacagtgcgtgatctgaccaagctgttaagctacgcactgcagaatgatacattccgacagatctactgcacctcagaatatacgacaagtgctacagcatccgcaccggaaggtttgcattttctgagtacgatgttcaagaagatggattctccggaggtaaatggcggagagatcgaaggcggtaagaccggatataccggcgaagcaggacagtgtctggcaagtcttgccaaagtagatgatgtagaatacatcctggtgactgcaggagctccgggaggaccttccaccgagccataccatatcgaggatgcaaaagctgtctataatcgtatacaggcaggagaacagggatctgcagcagatacggccgctgattcacaggatgaccaggcaacgacagagaaggacggagctgcctgagagattttaaggaaaagttaagaaaaaagaagaaagattcgtcagaagtgtatggtatgataagatcatcaaaagagattttactatactaacatgtttgaatagacagaagcgttttccgtgcggccgcatggaaaacgcttcttttgtgtatactttttgtgtacagacaaaaaagacccgaaagcgtcaacttccaggtctttttctcaagttaagggatgcaaatattatgctctttcaactttgccggatctcaggcaagaagtacaaacgtacattttcttagctccaccgtctaccttaacctttacagattttacattggatttccacattttgctagatcttctatgggaatggctcacgttgtttccgaaatgagcacctttttcacagatcgcacactttgccatgactgcacctccttaacactatttatcgtaatcgttcgtaatcatagattcgcaacactagatattctaacagaagaattatcattttgcaagcaaaaatataaatttttcaaaaattatatttctttttctacaaaaacaggttataatacatacagtataattcatcagcgagggaattttcaccccaaaatgagttataaagttgttgagaacggagtgaacagcagcgctataaaatgagaaaagagcaggttattgtaaacaaataaaatatgtcagcacagcaataccgggaggaaccggggaatgaagaagacggacagaacaataaccgggaatggaggttgacctatgaaagggcgtatgaacacgggaatgggagaaattaccatcaacacagatgtgatcgccacttatgcaggcagtgtggctgtggagtgttttggtattgtaggtatggctgcagtaaatatgaaagacggtctggtaaaactcttgaagaaagacagtctgaaacatggaatcaatgttacattaaatgaaaataagatttccctggatttccatgtcattgtagcttacggagtaagtatccgtgcggtttctgacaacctgattgccaatgtaaaatataaagtggaagcgtttaccggtattgaagtggaaaacatcaatattctggtagaaggcgttcgcgtaattgattaatgaaggaggagctttagaaagcgatgaatacaatagatgccaaactgcttgccaggatgtttctggcaggagctaagaatctggaagtgaaaaaagagtggatcaatgagttaaacgtgtttccggtaccggatggtgatactggaaccaacatgactctgacgatcatgtcagcggtaaaagaagtcaataatctggaagatgtacagatgacatccctggcaaaggctatttcctcaggatctttacgtggtgcaagaggaaactccggtgttattctttctcagcttcttcgtggatttaccaaaggaatccgtgatctggaggaactggatgctgtagcactggcacgtgccgtagataaaggcgtggagactgcatacaaggcagttatgaaacccaaagaaggaacaatccttactgtagcaagaggtgttgcagacaaggcactggaactggctgaggatgcggaagatctgcagacattcctggaagatgtactggaagaaggacgcagagttcttgcgaaaactccggatatgctgccggtactgaaagaagcaggtgttgtggattccggcggacagggtctgatggttgtcctggaaggtgcctttgacgcgtttatgggaaaagaagtggatctgacttttgacggaggagaaagcgcaaaagttgtaaaaattactccgcaggcagaagcagatatcaagtttggatactgtacggaatttatcattgtattaaataaagaatttactgcagaagatgaggtggactttaaggcatatctcagctctctgggtgattctatcgtgtgcgtggctgacgatgaagtggttaagattcacgtacataccaatgatccgggactggcgatccagcgtgctcttacctatggttctctgtccagaatcaagatcgataacatgcgtgaagaacatcaggaaaaactgattaaagatgcggaaaaaattgctgcacagcaggcagaagaggcagcaaaagcaccgaagaaagaagtaggatttatttctgtgtccattggcgaaggtttcggacagattttccgtgatcttggtgtggattacctgatcgagggtggacagacgatgaatccgagtacggaagacatgctgaatgcgatcagtaaagtgaatgcagagcatatctttatcctgccaaataataaaaatattattctggcagcaaatcaggcaaaagcactgacgaaagacaaagatatcattgttattcctaccaagactgtaccacagggtattacagcagtgatcaattatgtaccggaaaaatctgtggaagacaatgaaaaagatatgacagaagaaattacccgtgtaaagaccggtcagatcacatatgcggtaagagatactcatattgatgataaagagatccatgaaggtgatatcatgggtatcggagatcatggtatgctggctgtcggaaaagaagtggcagcagtagcaaaagagactgtagaacagatggtggatgatgagacggaactgatcagcatctattacggagaaggttttacagaagaagaggcagagaaactggcaggagaactggaagaacagtatgattactgtgatgtggaagtgaattgcggaggtcagccaatctactactgtattatttctgtagaataaaaattgtccggttttatgggacgtttgaaaaggatgtctgttcaaagttctgacggtgagacagggtgaaaatagaaaaagatgctggacagtattaagagttcagcatctttttctgtcagcaaagaaagaaaaatctgatcaggaagaaaacaggaatattggatctgtggagaggtgagaaggaaggatgaaagaaaaggaatctatccgaacactgaaaggtgtgggagagaagacagagaaattatttcagaaagtggggatttctacggtggggcaacttcttcggtattatccaagagattatgatatttaccgggagccggtgaccgtggagagcctgaatgatcaggagactggtgcagtgctagcaacactgacatcatcgctggatatgaaaaaagtgcggaatctgactgtaatctccggaaccattgccgatgcaaccgggcgatgcagggtgacctggtttaatcagccttatcttcggaatcagctgcggcgtggcatgacttttgtttttcgcggaaaaatcagtaaaaagggaaacctgtctgtgatggaacaacctgaggtctgcacaccggcggtgtatgaagaaaaactgaacagtatgcagcccaaatatgcacttaccgcaggtcttagcaacaatatggtaacaaaaatggtaagggctgctctggaacagctggatctgtcacaggattatctgccggaggagattcgtctggagtatgaactggcagaatataattttgcggcggtacagattcattttccatccggtcaggaacagtatctggaagcgagaaaacgactggcatttgatgagtttttactttttattatgggtctgaaacagctaaaggaacagaacgcagcggataaaaaccattaccggatgaaagaagtctggaagacggaggaagtgatggaaaatctgccatatcagctgaccggggcgcagaagaatgtctggtatgagattgaacaggatctgcggggggaaaaactgatgacccgtctggtacagggagacgtgggcagcggtaagactatcgtggcattccttgcgatgatcatgacagcagaaaacggctatcagagcgccatcatggttcccacagaagtgctcgccagacagcattatgaagctctgacaaagcttctggaagaaaatgagctgctggaacaatatcggccggtgcttctgacaggatccaatacagcaaaagaaaaacgtcagatctatgaagcaatcgcatccggagcgacaaggatgattgtaggaacacatgcgttgattcaggaaaaggtcacatatgaaagtctgggtctggttatcacggatgaacagcatcgatttggtgtgcgtcagagagaagaattttcatccaaaggacaaaaaccgaatattctggttatgagtgcgactccgattccacgaactctcggaattattctttatggagatctggatatctcaatcatcgatgaactgcctgcgcagagactgccaataaaaaattgtgttgtggacacgaattaccggaacaaggcttaccgctttatcgaaaaacaggtgcaggaaggtcatcaggtttatgtgatctgtccgatggtggaagagagtgagggaatggacggagaaaacgtcatcgattatgccgaacggctgcgccatgaactttcatcttttgttactgttgggattcttcacggaaagatgaaaccgaaagaaaaaaatgagatcatggaagcgttcagtgagaacaggatccaggtgctggtttccacgaccgttgtggaagttggtgtcaatgtgcccaatgccacggtgatgatggtagaaaatgccgaacggtttggtcttgcccagttgcatcagctgcgcggccgtgtagggcgtggacagtggcagtcgtattgtatttttattcatggcaaaaatcaggcggaaaaatcaaagaggcttcagatcctgaataagtcaaatgatggtttctatattgcgcaggaagatctgaaactgcgggggccgggtgatctgtttggtgtacgtcagagcggagatttgaactttgagatcgctgatatcttccgggatgcatcgatcctgaaaaaagccagtgatgcagccggatatatcctgtcactggatggtacactggaacttccgcagcatcgtctgctgaaagaaaaactggaagaatatgccggaagacagatagaagatccgggcctgtaagttgtgttttttgaagaaaaacttgcaaaatgtggaaagatggggtaaactaactgctgtagttggctattacttacagaagatattctgtgaagcagatggccggtaacgaaggaaacggtaacgttaacttgagtgtgattttgaggaggattatgaatatggcagttaagaaaacagttacgaaagcagcaaagccggcagttgaaacaaaggaagtaaaggctgaagagacaaaaacagtgaaagctgaagaagcaaaagcagctaaaactaccgcgaaagcagcagaagcaaagacaactgaaactgcaaagaaagcacctgcgaagaagacaaccgcaagaaaaacaccggcaaagagaacgacaacaaagaaagcggctgtagtgacagaagaagtatatctgcagtatgcgggaaaagaattctcatccgcagatctgaccgcaaaagtaaaagagatctggaaagagatgggtaaaaaagcagcagacttaaaggacatcaaagtatatgtaaaaccggaagagaatgcagcttattatgtgatcaacaatgaagagactggaagttttggcttataatagagactgaaaaacaatgcaacgaaaaatctcccggggagagcattttcccgggagattttgtgcgttcaggaagtcagcaatcgattactgcatgcttccgcctgtataaccggatccctggctcatctgtttttcctgagcttcgatcattttcttgaccatatagccaccgacagatccgttctgctttgaggtcaggtttccgttatacccgtcagaaaggggtacacccagttcgtttgctacttcaaatttgaaacggtctaacgcaccttttgcttccggtactgctgctgtgttagtagaagttttggacatgattggtttcctccttgacttgtttttgggtaactgtgatagtatgaaacagttacgtgtgtgtaacttgttgttacgctgttagtatgtgacaggagaaaaaaataacactagaagtttttgcaaatactggataaccttagattttttggtacaaacttacaaaaacaattgcagataaccaggtgatttgatataataaaactaaatttggatgagagggcgggttagagcatgaacattggcattattgcgcataacagcaaaaaaacattgattgaagatttttgtattgcgtataaagggattttggggaaacatgaaatatacgcaacgggcactaccggccggcgaattgaggaagttactaatctgagagtgcataagttcctggcagggtctgtgggcggagataagcagtttatggcgatgatcgagagaaacgccatggatctggtgattttatttcacaatccgaacatgacaagtccgaaggaaccgaacgtgtaccagattgcaagctgttgtgatcagtacaatatcccggtagcaaccaatattgcaacggcagagtcactgattctgggacttgacagaggcgaccttgactggagaaaccagatataaggtaacgattcggcaggcagtatcccgcgagggcgctgaacagttacaagataagaagatgtaagaaagaaaataaaacgatatgagagtaattgcgggaaaagcacgtagtctgcgtcttaaaaccatagagggtatggacaccagaccgactaccgatcgaattaaagagacattatttaatatgattcagccatccatagcagacagcagatttctggatttgtttgcgggaagcggtggcattggtatcgaggcgttaagccgcggtgcctcctggtgtgtgtttgtggagcagcagaggaaagcagcagagtgtatccgggagaatctggcatttaccagattgaaagaggatgccactctgttggtgacggatgcggtgtctgcggtgaacaagctggatggagaggatgccttttcctggatctttatggatccgccatatggaaaagggctggaatttcaggttttggaagcgttacagggaactactctggttgatgaagatacacagatcatcatcgaggagtcactggatgttacctgggagcgggcggaagaacttggttatgaaatcataaaagtgaagaaatacaagacaaatcagcacgtatttctgaaaaaaagaggagaattatgacaactgctgtttatcccggttcgtttgatccggttacaaatggacatttagatgtaatatcacggggcgcagagctttttgataaagtgattgtgggcgttttacacaattctacaaaaagtccgttgttttctgtggaagaacgtgttagaatattaaacgaggcgaccaaagatctgacaaatgtggagatcgtcgcatttagtggactgtctgtggattttgccagacagtgtaaagcgaaagtgattatccgtggccttcgggcaatcacagattttgaatatgaactgcagatggcgcagaccaaccgcgtgctggcaccggatgtggatacaatgtttctgacaaccagtctggagtatgcttatctcagttcaacaacagtaaaggaagtggcagcgttcggcggtgatatttccaaatttgtacctggatttgtgatggatgaggtacataaaaaattaaaaaaatagtaaagcaggaacttatcgataaggagagaagaaagatgagcagcagaattgaacagattattgaagaaatcgaagaatttgtagaaagctgtaaatatcagccattatctacaacaaagattgttgtcaataaagaagaactggaagaactgttaagagaacttcgtctgaaaacaccagatgagatcaaaagatatcagaagatcatcagcaataaagatgcgatactggctgatgcacaggcaaaagcagacagcctgatcgcagaagcacaggctaagaccaaagagatggtcagccagcatgaagtaatgcagcaggcatatgcacaggcaaatgagactattgccaatgcaaacaaacaggcacagcagattctggatgaagcaacaatggatgcaaataatattcgtctgagtgctatttcatataccgatgatatgatggcaaacatggaacagattcttgctactgcaatcaatgaatcaggagaaaagtacaaaaattatcttacatccattcagagctgctatgatgtagtaagacagaacagatccgaactggcaccacaggtatccggtgcggagacaacagaaacagaagaaactgcagaagcagatgcttcactggaaggtctggacgaagagtaagagccagccaaccagcagggtacagattccatgaactgtttttcctgcaatataagtacgaatcgagaggggagtgccgcagagcattccccttgtttgtgctatacaggacaatccaccaaaagaggcaaaagtcagggaaagaaggtaacggaggggcaagtgcatagaagaagcaccaacaagggcgattccggtagtcatttccgtgaatccggtgagaaataacgatagtacaggcacgggagcagtgagatgcaccaccagagatgccagaatagaaaacaggatgatatagcctcccagtttggtgacagattcaaatgcgtgcatgatggaagcatcgaccatatggctgagagaatggcggagtgtctgtgccgacggagaatccgaggggacagtgacatcacgacagtccggccggaggatcagacggaaaatcagcgaagtaagatataaagaaagatacaaaatgaaaaaggtatatccggaagcgtgagaaagatggagggtgtctgtgagaatataggagctgataaacacaggtcccggattgttacagaatgtcagcaggtactgcgcttcacttttggtgatttttccctcacggaacagatcagcagtcagttttgcgcccataggatacccacagataaggccaagcaggagtgcataggagccgtacatagaaagcccgaataaaaagcggaagacagttttgatctttcgaagcaatacagagaccagaccggtatgaatgaaaaagtccgagaaaatcataaagggaagcagagaaggaagcacatgaaaaaaccagagtgttactccggagacagaggactgaaaagcttcctggggaaaacacagcagataaataaaaacgaaaaagagaagggtatacagaattacagaacgcatggacatctccttacagtggatattacagtgacggctcattgggtaaagcgtgttaccgggaacagagcgaacagtgactctcaatggggctggttatatatatgccttgatttttgaatgtatttattctaaaataaatgtattgtggccggagggtaaggtatgcggctcaaaaactgacgatgtgaacggagtacgtcagattacaggaggttatagcaaatgacagtattagaaggattaaaaccggaaaaagtattttatttttttgaaaaactgtgtgagattccacatggatccaccaacatgaaagaaatcagtgattatcttgtttcatttgcgaaagaaagaaatctgaaatattatcaggatgaggcgtacaatgtagtgatctataaagaggcatctgccggttatgaagatgctccgattactattttacagggacattgtgatatggttgcagaaaagacaccggattcagatcatgattttacaaaagatggtctgaaactgaaagtggaaggagactatctgacagcagagggaacaacccttggcggtgatgacggaatcgctgttgcctatatgctggcaattctggatgatgatacattaaaacatccggcacttgagtgtgtgattaccacagacgaagaaatcggacttctgggagcaaaggcactggatacttccgtactgaaaggaacacatatgatcaacatggattctgaggaagaaggatatctgtggatcagctgtgccggaggattaagcggaaccagccggattcctgtagaatatcaggaaatggaaggagtagtaacagaagttttaatcgatggtcttaacggtggacattccggagcagaaatcgataaaaatcgtgcaaatgccaataaactgatgggtcttttcctgtatgaactgggacagaagactgcatacagcatcaaagatctgtccggcggaacgaaagataatgcaattacaagaagctgtaaggcaacactggttcttggtgaggaagacctggcggaagcgaaaatcacagctgaaaaactgcagaaagatcttcgcgctgagtatgcaggaagtgatgaaggaatcactattaccgtaacaacgggaaaagaagaaactgtgcaggcactttctatggtcagtaaagaaaaagttgtattttatcttgtacatgtaccgtttggcattgagaagatgagcggagaaatcgaaggactggtagaaacctcaagtaatcttggtatcctgaaactgggaaaagatgcgttatattccaccagcagtgtgagaagttctgtgggaagcgcaaaagagcatctgtctgcaaaattacagtatctgacagaattcctgggaggatcttatgaagaacagggtgattatccggcatgggagtacaggaaagattccaggatgagagatctgatggcagatgtatatgaagaactttttggtgagaaaccggtagtgaaagcgattcatgcaggcctggaatgtggtctgttttatgacaaaatcccaggtctggactgtgtatctttcggaccgaccatgattgatattcatacaacggaagaaaaactgtccattccgtcaacggaaaaaatgtggaagtatctggtacgcactctggagaaaatgaatacgatcagataaatgaaaatacaaaaaagtgaaaaagagggctgtcgcggcgcggcagcctttttctctggaaaacatttaaattgcagttctgaaaaggcagggaaaagcataggatatataggatgaggaaagttactgaccagtgaagtgttttcctgactggcaaagtatgttataatgtacgaaagagactagattatgacgacagaataaggagaggttaacatggaaatacaattatggcgtgaaatactcagtccctacgagcaggctgttacagaactggtagaaaagttccaacatctgagcctggaacacagggaacggggattgtattctcccatcgaacaggtcacaggacgtgtaaaaagcattaccagtattctggaaaaaatgaaacgaaagaacattccgtttgaggaaatggaagaacaggtagaagatattgcaggcatcaggatcatctgtcagtttgtggaagatattcaaagagtgtcggatctgatcgccgggcgttccgatatggaaatcaaatgtatcaaagattatattgcacatcagaaagagagtggttaccgaagctatcatctggttatttattatcatgtagagacattaaatggtccgaaaaagatccaggcagagattcagatacgaacgatggcaatgaatttctgggcaaccatcgagcattctctgcagtataaatataagacaaatattccaccatatgtcaaagaacggcttgcgaatgcggcacaggcgattattgcactggacggtgagatgtcttcggtgcgaaatgaaattatgaatgcacagaattcttctctgatgcagcgtaatctggtgatggatattttacagaatattgagaatttgtatcagaagtccaatcgcagagaggtggagaagatacaggatgagttttaccggatctatgcatccaacgatctgcagcagctcaagcggtttcatcaacaacttgatattattgcggaagggtattgtgcccaggcggtgacgagtgagggatgggatcagaacctgtagtacagagaaattgttttatgacatttactatgagaaaaaggaagaatacagatgcacttacctgagaaattccagaaggagatggaaatccttctgggggatgaatatcaagcatttaaagaaagctatgacagacagccggaaaacggtctgcgtctgaaccgaagaaaggtgacgggagaggagttcctgacccgtacacctttcttgttgaaaaaaataccctggatcgacaacggatatacgtacgggaccggtacaccggcgaaagatccgtattattatgcgggattgtattatctgcaggaaccgagtgcaatgacacctgccaaccgtctgtcgccggaaccgggtgattatgtgctggatctgtgcgcggcaccgggaggaaaagcgaccgagcttggtgcaaaactgaacggggaaggactgcttcttgctaatgatatcagtaacagcagggcaaaagcgctgttgaagaatctggaactgatgggaattcccaatatttatgtaaccagtgaaacatcggaaaaactggcgaagatactgccggagttttttgataagattctggtagacgcaccgtgttccggggaaggaatgttccgcaaggagccgcggatgatggcagactgggaacagcagggaccggaatattatagtaagcttcagagagagattattctggatgcggcagatatgctgcggccgggaggaaaacttctctattccacctgtacgttcagtgagttggaaaatgagggaacgatccagtatcttctggaacggcggccggatatgaaactgatcccctgtgcaccatatgagggatttgaaaaaggccgcagaggtctggaagcctgtgtgaggatctttccgcatcgtatgaacggggaaggccattttctggcgttgctggaaaaacagggtgagccgcggaaccgaaaaaaagccacaggaaaaaattcagtgatccctacagaagcaaaagaattcttggagaactggggcatgtataagagggaatggcagtattatctgcgggacgaacgtctgtatgcccttgggaaaaaggatggtatgccggaaaatctgcgatatcttcgtacggggctgtatcttggtgagtgtaagaaaaaacggtttgagccgtctcaggcactggcgatggtgcttgacggagagggagagaaccggattcatctgaaccgggacgatccacgggtgatccgttatctgaaaggggaaacgctggatgtatcggatcttgatctgaaaaagagaaaaggctggcagttagtctgtgtagatgaatatccgcttggctggggaaaacttgccggcggaagtttaaagaataaatattatgcaggctggcgctggcagtgataaggagatggagatgagcgaaatcattcgtttggataaatatctggcagatatgggctgtgggacccgaagtcaggtgaagcagatgatccgcaaagggcaggtggagatcaacggagaaaagataaaaaaaccggaacagaagatcactattgctcaggatcgtgtatgcgtggcaggaaaagaaatccgttatgaaaaatatcgttattatctgcttcataaaccggccggttatgtgtcggcaaccacagataaccgggataaaacagtactggaactgttgcctgagaatattcgcagggagctgtttccggtgggacgactggataaagatacagagggactgctgctgttaacgaatgacggtgaacttgcccaccggctgttatccccgaagaaacatgtggacaagacctattatgcaagaatcgacggaaaggtagacgaagaggatcagagagcttttttgcagggggtagatatcggggatgagacaaagacagctccggcaaaacttgagatcttaaagagtgcggatatttccgagattttgctgacgatacaggaaggacgtttccatcaggtgaaacggatgtttcaggcaagggacaaacaggtgatctatctgaaacggatgactatgggtccacttgtgctcggtgatgatctgccgaaaggcaattaccgggagttgtgtgaagaggagcggaaagctctagagcgtgtctgaaaaagcttttcgtaagctgcgagtcccagtttgtaggagattttatccgaatgagggcggcgtagcgggctacggcaaccgaatgcgggtaaaatataccgcaaagtggggcttgcagattgcggaaatgattttcagacatgctctaggaacagatacagaaagataaaggataaatatatatgttagaaaatatcaaagcagtgttgtttgatctggatggtactctggtggattccatgtggatgtgggaagacatcgatatcgaatatctgggacggtacggatatgaactgccgcccgaactgcaaaaagacatcgagggtatgagcctctcggagacagctgtgtactttaaagaacggttttctatcccggagagtctggaagaaattaagagtacttggatggatatggcaagggataaatataccaacaaggtgccgctgaagcccggagcgagagagtttctgatatggctgagacagcagggaatccggacggggattgcaagctctaacgggattgaactggtagagacggttttaaaggcacagggaatccaggaatacctggaatccgtacatacctgctgtgaagttccgaaaggaaaacctgccccggatatttatcttctggtggcaaagacactgggggtaacaccggaggaatgtctggtttttgaggatgtacctatgggaattctggcaggaaaaaatgccggtatgcgagtctgtgcggtggaagatacgttcagtgccagccagagagaagaaaaaaaagagcttgcagattactacatagaaagttatgatgagataccaagagaaaggatgcagccatgagcggagagtttttgccggtgacaatggaagagtgccgggagagaggaatagaacagccggattttgtctatgtatgtggagatgcgtatgtggatcattcttctttcggggcggcgatcatctgccgtctcctggaaagcaggggctattcggtgggaatgatagctcagccggactggaaagatccggaaagcatccaggtgtttggtgaaccgcgtctgggctttctgatatctgccggaaatatggattctatggttaatcattatacagtgtctaaaaaacacaggcagaaagatgcctattctcccggtggagagatgggacatcgaccggaccgggcggtgatcgtctatggaaatctgattcgaagaacgtataaaaaaacaccaatcatcctgggaggtatcgaggcaagtcttcggagaatgggacattacgattactggtccgatcaggtgaaacgaagtgtacttcttgactccggggcagatatgatctcatatggaatgggagaacattccatcgttgagattgcagatgcgctggcttccgggctggatgtaaaagatattacctttatccggggaacggtataccgctgtaaaagtgtggaacatataccggaaccgctgtatcttccttctttcgaagagataaaagagaagaaagaacagtatgcaagaagcttcgggatccagcatcagaatacagatccatatcaggcgaaggttctgatagaagattatggcaatcagggctatgtggtgcagaatccaccggcatatccactgacagagcaggagatggatgatgtgtatcatcttccgtttatgcggacctatcatccgatgtatgagaagaaaggtggcattccggcgattgaggagatcagattcagtcttaccagtaatcgcggatgttttggcggctgtaatttctgtgcgctgacctttcatcagggacggatcgtacaggtccgcagccacgaatcattgttagaagaagctgttgagatgacgaaagatcctgattttaaaggatacattcatgatgtgggtggtcccacggcagattttcgacagccggcctgtaaaaagcagttgacaaagggtgcatgtaccaaccggcagtgcctgttcccgacaccctgcaaaaatctgatcgcggatcattcggattatcttacgctgcttcgaaaactccgtaagattccgaaagtaaagaaagtatttattcgttcgggcatccgctttgattatgtgctggaagatacgaagagccattttttacaggaactggcagattaccatgtgagcgggcagttgagggtagctccagagcatgtggccgataaagttctggaaaagatgggaaaaccgtcccataaggtttacctggaatttttaaaacaatattatgcctgctgtaaaaaaagtggcaaagaacagtatgcagtgccttattttatgtcttctcatccgggatgtggactgaaagaggcagtggaactggcagaatatatccgggatatgggatttatgccggaacaggtacaggatttttatccgacaccgtcgacaatatctacctgtatgtattatacgggactggatccgcgaacgatggaaaaagtgtatgtaccggtcaatccccacgagaaaaatatgcagagagccctgattcagtatcgaaggccagagaaccggaaactggtggaagaagcactggtcagagcaggaagacaggatcttatcggatttggtccgaagtgtctgattcgtccgtatgatggcagaaggacacagaaggcagaaaatctgaaaacgcagaatggacatatcggaaataacggaaaaaatggaagaggaaatcataatcaacaatcgaacggccgtcagcaaaaacagcatatgggtaagaaaaagactatccgtaacgtgcataaaaaacggtaacagaaaggatacagcatgaaaaaagtaaataaaggtgattatggatatattcgatatgagaagaaaaaacgactgctgattacagttgcactgtttctgattcctctggcagcatttctggcagcgtttctgattacaggaaccaagaaaaatattattacggtaattgctatggtcggctgccttccggcgtgccgtgccctggtaaatatgatcatgatgtggatgcagaaaccgatggatgagaaagtatacaaaaagattcgggaacacgagggtgagctggaagtaacttatgaaacgtatctgacgacctatgaaaaaagtgtatttgtggaaagctttgcaatctgcggaaacaaggtgatcggttataccagccatatggacggatccacacagtttatcgaagatcatgtgcgggggatcctgaaacagaacggttataaagtagaagtaaaagtcttcaaagaactgaagacctatctggaacggatggattatctgaatgcacacaaacaggaactggagcagaatattttttttaagccggatgaacgatatccggatctgtccagagatcagctgatcaaacatacgatcctggcgatttctttgtaaggtaaaagggaaaaacatgagagatctgacaatcggaaaaaatgaagccggccagcggatggataagtatctgaaaaagtactttccggaagccggatccggattcttatataaaatgcttcgaaagaagaatattctgttaaacgaaaaaaaagcagacggaaaggaaatgttgaagccgggagaccgcatccggctgtatctggcagaggagacgattgaaaagttccgtggggaacagatgagaccggcagtttccggcaggaaaacgtctgacataaaactggatgtgatctatgaagatgaccatgtggcaatagtcaataaaccggcaggcatgctgtcacagaaagcaaaaccgtcggatctgtcgctggtggagtattttcagcgatatctgctggagacgggagcaatcagcgaacaagagttagagacttttcatccggcaccctgtaaccggttggaccgcaataccagtggtctggtgttgtgcggaaagagtctggcagggctacaggcactgtcggaagcactgaaactgcgaacgctgaaaaaatattatctggcgctggtgcttggaaaagcagacaggccgggacatcagaaagcctggctgagcaaagatacaaaaaccaatcaggtaaaagtgagcactggtcaggtgcctgaaagttctccgatcgagaccgcctgggagccggtctggagcaatggagaggaaacgcttttaaaggtggaactgatcaccggaaaatctcatcagatccgctgtcatctggccagtctgggatatccgctggcgggagatccgaagtacgggaatgcccgctggaataggaggctgaaacaggaatatggtctgaaacgtcagttcctgcatgcatggcaggtggaattcccacgaatgtccggtgcgctggaatctttgtcgggaaaatgttttaccgcaccgcttccggatgaactggaacggattacagagggtgagagaaagaagggtaaattatgacagaagagagaatagacggagaagaaacgaaagagaagaagaaaccgaaaaagagtctgaaaagggagcttatggaagacgtaatcatgatcgtgtttgttctggtaacggtctgggtgatgaaaaattatgtactgatcaatgcagttattccttcggcatcgatggaagatacgatcatgacgggcgaccggatctttggaagcaggctgtcatatgaattcggcgagccacagagaggggacattgctatctttaagttcccggacgatgagagccagttgtatatcaagcgagtgattggacttccgggagataaagtgcagattattgacggaaaggtttatattaacgattctgaaacaccgttagatgagccttatctgccggaaccaccggaaggcgattatggaccgtattatgtgccggaagacagctactttatgctgggagataaccgaaactggtcgaaggactcccggttctggacgaatacttatgtgaaaaaagaaaaagttctcgcaaaagcgatcttccgttattacccgtttaacaagatcggtgtgatcgaaaaggactgatgggaggaaaatatggcaacctggaattcaagaggactcaggggttctacactggaagaactgatcaaccggagcaatgaacagtaccgtgaaaaggggctggcactgattcagaaagtgccgacaccgatcacgccggttcggatcgccaaggataccagacagatcaccctggcgtattttgaacagaaaagtacggtggattatatcggggcagtgcaggggattcctgtatgcttcgatgcgaaagagtgcaaagaaacagtctttccccttgccaatatccatgagcatcaggtgcggtttatgagagagtttgaacagcaggaggggatttctttcctgctgatttatttttcgggaagaaatgaattctattatctgacatttcgggatctgtggtggttctgggaacgggcgcagaatggtgggagaaaaagttttctttacgaagaactgaatccctcttattttcttacgaaccacggtgggattctggtgccgtatctggacggaatccagaaagatttgcaggacagggattgacaagtgtgctgtcttcacatataatgtattagcatagtaacacattagcatactaaagtgaaagaagattaactgtccagatactgcacagttacaaagttacataacaagattaaagaagaggatagaaccatgagacaattatttcataccccggaaggagtccgggatgtttacggaaccgaatgtgcaaaaaaactgtatcttcagagaaaaatggagaaaatctttcatgcatacggttatcagagcatagagacaccgaccttcgaattctttgatgtgtttggaaagcaggtgggaaccacaccatccagagaactttacaagttctttgaccgggaaggtaatactctggtacttcgtccggactttacaccttccatcgcgagagcagcttctatgtattatcatcaggaagatatgccgattcgcctctgctacagtggaaacacctttgtgaaccgctccagctaccagggacgactgaaagaatccacccagatgggtgtggagcttttgggcgatgcatcggtggacggagacggtgagatcattgccatgactgtagaactcttaaaggcagcaggattgaaagaattccagataagtatcggtcaggtggattttttcaaagcactggttgatgactccggtatgtcggaagagactattcaggaactgcgccagctgatctccaacaagaattattttggtgtggaagaacttctggagagtcagagactgtccaaagaacaggtagaagcactgacagaactgccacaactttttggtggcccggaagtactgaaaaaagcagaaagtcttactggcaaccccaaggcactggcagcgatccgcaggttacgggaactgtatcaggtggcctcctgctatggctgtgaagaatatatttctttcgaccttggcatgctcagtaaatatcagtattatacaggcattatcttccagggatttacctatggcacaggtgagccgttagtaaccggtggacggtacaacaggctgctggaacattttggaagacctgctcctgcaatcggtttctgtctggtaatggaacaggtgttgaatgcactgaatcgtcagaatattcaggtgccggtgatggaaggaaaacgactggtcttatataatgaaagaaatcgtgaagcagcgattcggattgccggtatgcagagaacacatggtatgcagatccagtgtatgcggatggaagaaggtctgaaagcggaagactatatcgcatatggaaagggtcatcagtttacggatattgtatctccggtgggagaagatcaggtacaggtgatcaatctgtttaccgatgaagtacagatgaccaatcagaaaagttttcagtaggaggaaagacccatgagatatttaaccatcgcactgacaaaaggccgtctggcagagaaaacactggagatgctggaagctgtaggcattacctgtgaagagatgaaagataaaaagacaagaaaactgatttttgtcaatgaagatctgaaacttcggttcttcctggctaaaggaccggatgtcccgacttatgtggaatatggagcggcagatctgggtgtcgtaggtcgcgacacgattctggaagaaggaagaaaattatatgaagtgatggatcttggctttggaaaatgcagaatgtgtatctgcggaccggaatctgcccgggaactgctggatggtaatcagcagatccgtgtagccaccaaatacccgaatatcgccaaagattatttttataataagaaaaaccagaccgtggaaatcatcaaattaaacggttctatcgagctggcaccaatcgtaggactttccgaagtcatctgcgatatcgtagagaccggttccactctgcgggaaaatggtctgcatattcttgaagaagtatgccctctgtccgcaagagtggttgtgaatcaggtaagcatgaaaatggaaagcgaacgtatctcagagcttttaggaaagttaaaaaaggtcatcaaggaggcagacagatgagaatcgtaaaattaacaaaagaaactacaaaaaatattctgggaaatatgttaaaaagaagtccgagccagtacggagagtatgaaagccgggtgcaggcgattattcagaatattaaagaaaacggagatgaggctctgttttcctataccaaacagtttgataaagcagatatcaatgcttccaatgtaaaagtaacagacgaagaattcgaagaagcatataaagcagtggacccggcgcttctggatgtgatccgcaaggcgctggtcaatatcgagagttaccatgaactgcagaaacagaacagctggttcaagagcaccccacagggaacgatgcttggacagaaagtaacaccactggaaaaggtaggcgtctatgtaccgggaggaaaagcagtatatccgtcgtctgttctgatgaatattatgccggcaaaagtagcaggtgtagataagatcattatgaccaccccatgtaatgcagaaggaaaggtgaatccggctgttctggtcgctgcaaaagaagcaggcgcagatgaagtctataaagcaggtggtgcacaggcaatcgctgcccttgcttttggaacagaaagtattccgaaagtagacaagattgtaggacctggaaatatctatgtagcgttagcaaaaaaaacagtatacggtcatgtaagcatcgattccatcgcgggaccgagcgagatcctggtattggcggatgagacagccaatccacggtatgtggcagctgatctgttatcccaggcagaacacgacgagctggcatctgcaatcctgatcacgacaagtgaagattttgcaaagaaagtcagcgaagaagttgagggatttgtacaggttcttgaaagaaaagcgattattcagaaatctttggataattttggatatattttggtggcagaggatatggacgaagcaattgataccgctaacgagattgcttccgagcatttggagatcgttaccgccaacccgtttgaggttatgacaaagattcggaatgcgggcgcaatctttatcggggaatacagctgtgagccgctgggtgattattttgcaggacctaaccacatcctgccgaccaacggaaccgcaaaattcttctccccactgtctgttgatgattttgtgaagaaatccagtatcatctactactccagagaagcgctgcaaccgatccacaaagatatcgagcagtttgcaaaatgtgaacaactgaccgcacatgcgaactcgatcgcagtgcgttttgaaggggaggaataaggtatggagatccgcagactggaagaacagggtatgacccgtaatgtactggtacagcgaaataccaaagagacgaagatcacgatgagtctgaatctggacggaaccggaaaagccagcctgaataccggcatcggattttttgaccatatgctggatggatttgcacgtcatggattctttgatctggatcttgccgtagacggcgatctgaatgtggacagccatcacacgatcgaagataccggaatcgtactgggtacggctattaaagaagcactgggcgataaagctgggattcgccgttatggaagcatgattcttcccatggacgagacactggtactttgcggcatcgatctgtccggtcgcccgtatctgaactttgacggtgaatttaccgcagaacgtcttggagatatggatacagagatggccagagagtttttctatgcggtcagctatgcagccggcatgaacctgcacatcaaggtactggacggaacaaacaatcaccatatcatggaagcgatgttcaaagcgtttgccaaagcactggatcaggcaacgcagatggatgagcggattcagggagttttgtctacaaagggcagtctgtaaaagggctgagctgcagacacaaggaaactccagggatatatttatacaaaaacagaggaatcgatgagcatggaagaaaaaaaagaaacaccgttaaaagctgcatttacatgggatgagttaaaactgaacagtgacgggatggtctgtgtggtggtacaggacgataaaaataaagatgttctgatggttgcctatatgaaccggcaagcttatgaaaagacgctggagaccggtgtgatgacttactggagccgcagtcgaaacgagctttgggtcaaagggcttaccagcggacattttcagtatgtccggtcactgtatctggattgtgataacgatacgatcctggcaagggtggatcaggtcggtgcagcctgccataccggaagccgcagctgcttttttaaagaaattatgaaaagcgataatgtagcggaaaatagttgaagattgtctcgataagacaggacaaaacaggtgaaatgcataaaaaatcaacatggttttcagttaattgttagacagaatatgtcttgagtattttagtattgatgctataataggatatgattttattttattattctatcctgttatagcattttttgtgctgttgatgaaagcggaaatactgtcagtaagaaaatgatacatcacagcagcagcgtaacagatatctggaggaactatgaagattataattatcggatgtggaaaagtaggttctgccctggcagaagaactgaccatggaaaatcatgaagtggcgattgtagatatatccgctcagaaattacaggaggtaggagaggatctggatgccctgcagattcatggaaacggatccagcatcaacgttctgatggatgccggtgtgacatctgcagatcttgtgatcgcagtgaccggatcggatgaactgaatctgctgtgttgtcttgtggcaaaaaatctgggaaaatgtcatacagttgcccgggtaagaaatccgatttacaacaaggaaatcaatctgatgaaagagagtcttggcatttccatgatcatcaacccggagatggcaactgctgcagagatcgcacggctgcttcgctttccttcggccattaaaattgatccttttgccaagggaaaagtggaactgttaaagttccgtctgaaaccggaattccgtctggacggtaagtctattgttgagatcaacatgaaagggaaacataatattctggttgcgggtgtagaacgtggcgagcaggtattcatcccgaacggtgattttgtactgcaaaacggtgatctggtatcgatcctggcatctccgaagaatgcttccgcatttttcaagtctattggtttaaagaccaatcaggtgagaaactgtatgatagtgggtggcggaaccatcgctatcttccttgcaagaatgttgctggagatgaaaatgcgcgttgtgatcatcgaacagtccaaagagcgatgtgagctgctggcagatctgctgccggatgcaacggtggtcaacggggatggtacaagcaagaacctgctgtttgaagaaaatctggaaaacgctgaagcgtttgtggcactgactaatatggatgaggaaaatattctgcttggtatgtttgcggagcggatgtcccatgcaaaagtagttacaaaggtcaatcgtgtggcgtttgatgatattacagacgaactggaactcggaagtctgatccatccgaaatatatcacgacggatcggattcttcaatatacgagggcaactcagaactccatcggaagtaatgtggagacactgtatcatattctggacagcaaggcagaggctctggagttcgtgatccgggaaaattcttcggtagttggcgtggaactgaaagatctgcggttgaagaataacctgttggtgggttgtatcaaccggggcggtaaggtattgattccacgtggcgatgactgtctgatggtgggtgatacggtagttgtggtaaccagtcagaaatgcctgcgggacattgaagatattctggaaaaataggagagatacgtatgaattatcgaattattacctatgtgatcggctgggtactgaatctggaagccatctgcatgacacttccggcagttaccgggctgatctatggagaaaaaacatggacctcctttttgatcacaggactgatcagtgcgctggcaggaacgctccttgtagtgcgtcgaccggaaaaaccgcacttttttatgaaagagggatgtgtatcggtagctctttcctggatagtgctcagtctgattggcgcgttaccttttatgatcagcgggacgattccgcattttgtggatgctcttttcgagacggtctcaggttttacaacaacgggagccagcattatggcatctgtggaagatgcaccacgttgtatcctgatgtggagaagttttacccattggatcggtggtatgggtgttctggtattattgctttctattattaagatgagtggtggttcacagatgaatctgatgaaagcggagagtccgggtccctcagtcagccgtttggcacctaccgtacgttctacggcaaagattctgtatacgatctatcttctgatgacggtgctggagattgtgattctgctgttatgtggaatgccggtatttgatgcgctgacaactgcttttggtacagccggtaccggagggttcggaatcaagaatgacagtatgggtggctatagcgtaacgattcagatcgttgttactgtattcatgattctgtttggtattaatttcaacgtgtattttctgttgctatccaaaaaatggaaacaggcactgaaaaatgaggaggtacgctggtatctggccatcattctgggcgcggttcttctgattggatggaatatccggggagtctatggaagtatgggaaaggcaatccaacaggctgctttccaggttgcatcgatcattactactaccggatttgcgacggttgattttaatatctggccggaggtttcccggacgattctcgtgcttctgatgtttgtcggtgcgtgtgcaggcagtaccggtggaggtattaaagtttcgcgttttattatcctgttaaaagcgatgaagaaagagatcaagcagtatctgcatccccgtcagatccggaaaatccggatggatggaagagttgtggaacatgaagtggtaagaaatgtcaatgtgtttatggttgtgtatatcatgatttttgcgacttctgtgtttattctggcatttgataatctggatctgatcacgaattttacggcggttgcggcaacttttaataatattggtcccggactggagctggttggaccgacggcgaactttaatgtgttttcggatgttggtaagtatgtgttgatttttgatatgctggcgggacggttggagatttttccgttgctgctggtgttctttccggatacgtggaggaagttctaaaataagagagggcgtttgccaacatggggacgccagaaagagaattggcaggaggacgccagaaagccgatcgcactgtctgcggcaacgtgggcagggcaactttaagctagccgctaacttcggctatggttcacgagggtcagctgaccctcgcgaaagcctgcgtaagcgtcggatcttaaagcttgtcctaaccgcccacaaagtgttgctcgcaaacagtgcgatcggctttctggctgcttattggctgtaattgtggtgagcggtgtcgacaaggggagaagagaagtggtgtagtaactgggagatgttggtaatgaaacatgaaaattaatgtttggaaggtataattagaatatgttaatggattatgaaggtgaaaagactggaaacaaagagccgacaggtgtatctgcgtgatgcgagatacaatacctgtcggctttaatattttgaggatggtagcatagtgttttgggtgctactcatcccagccttcgtagaatcgaatgtttacggagatgatgcggacgatgtcttccggggtcaggtcgaggtcggaggggtcggagatgctgggaaggtttggttcttcttcgtccagttctacggtgatccagttgtaggcggcttcgttggcattctcgatggcttcgtccagagtatctccggtggaggtgcagcattcgagatccggaaagtagccgttgtatgttccgtcttcatttttgcggaagacagcagggtacataaatttcatgggtaagactcctttgtttttgattctgtgatttagtataatagtgtctgaaacagcgtttaatagtttgctccaaactttttttagtatacaatatcttttaatgattggcaaataaatgcggaaaatataaataagaaaatcaagtccttttcagaaaacaacagttgagatgaaggaaaatcagagatataataaaagaacagaatctgtcagaaaagagtacaaaaagcaggagggttttaacatgaggaaaaatttaggagcaaaagcatatacatatccacagccggtatttatcctggcagcttacggagaggacggaacaccgaatgcaatgaatgcagcttggggcgggatcagtgatgaaaaagaactgaccatgtgtatcagtgccggccataagacaacggaagatattctggcgaaaaaagcatttaccgtaagtatggcagatgctgctcatgtggaagcatgtgattatgtgggaatcgtttccggaaccaaagagccggacaaattcgcaaaagcaggatttcacgcagtaaaatcagagttcatagatgcaccactgatcgaagaactcccgattgccgtagaatgcagactgaaaagctacgacccggaaagttgccggatggtgggagaaatcgtaaacatcagtgtggatgagcgtgtactggacgagaacggtaaagtggatgtggcaaaagctcagccaattacgtttgatccgtttaacaatacctatgtggtactgggaaaaaccgttggaagagcatttcatgatggaatgaatctgaaaaaataatgtaactgttcagtaacttcacagttaagattcgatgaagagttattgaataaaaacatctgaacagatggaggagatacaccatgacagtacggattctgaatcatggattgagtagttttgggagctattgcggactgaactatacctatcggatgcggaatgagtccttcttttatggaaaaaatgtttgatccttttgaacgggagaagaattctacgctcagcggtgtccagggaaccggacttggccttccgatcgttaagcggtttgtagaactgatggaaggaacaatcgaagcaatctccactgagggtgtcggaacagaatttattataaaaacagactttctgctggtgagcagggcacttttggaaacaacgaacagaccatcaacagtatccgtgaaacagcagatcatgcatgctaaatcagaacaccaggaaaacgtatcggcggatgtatcggatttataccgaagaaaaacgactgccggtaaaaccggggaaaatggaacgagagttatcttcatgacagaaataagaagatgattctggaaagtataaaggaaataaaattttaagtgaaagactcgatgctgagaataaaagcaggcatcgagttttcacatacaaaggctgaagttaccatatgaaagaagacaaaaccgaacagcactgggacaagctgcttcatatccgcaccagtggaagagatgattctcactcggatcagtaccgatatccctatgagtcaacaccatatactgtattgcaacgccttgcggattccgggtatatccgaaagcacaatctgttgttggattatggctgcggaaaagggcgggtggatttctttttgtcctggcagaccagatgtcagtctgtcgggattgaatatgatgagcggatctatgaaaatgcacagaaaaataaagagatagcagtttcttccggacgggtatcttttgaaaaagtggatgcgacagaattcgttgtcccggatcaggcggacaggatgtatttttttaatccgttttctgtagaaattttgcagcatgtgatagcgagaatactggagtcctattaccggaatatgagaccgatccaactgttcttttattattcttcggatgactacatagcgtgtctgatgaatgtggaagggttacagtttgcagatgaaattgattgcaaagatcttttcccaggagagaatcagcgggaaagaatcgtaatattcgaactgggagaaatcgcgggttgaaatattgaaagttaaagaacgtgaaggagaagaacattatgggagatcatgaaagaggaaagctggatgacagtggattccactatgacggctgtgcaggcggtccctgtggatgcgatggaggaagcggaggttcaccgagaagaggtggcggtggagatggtctgtggatagttgtgggtctgatcgtggtttttggaggggtaatcggactggcagaactgacaggaataccgctggaaaactggtcgacagggataatacttttagtgatgtttcttctgtttctgttgtttggagtgattattcttttgttttattaagaatagaaagaatattcagcataaaaacatcacaaaaaagaaaaaaagattgacaatcaagtatacttgaatgttatcataaaagtaaacaaaaaagaaagaagggtttttacaatgagtgttgatgtaacaaaaatgccgaaactcggtttcgggctgatgagactgccggagaaggacggggaactggatctggagcagctttgtaagatggtggatgcgtatatggcatccggaatgaactattttgataccgcatatatgtactgcggaggaaaatccgagagcattatcaaaaaagcgcttgtagagcgttatccgcgtgacagttttacactgacaacgaaactgccacaatggatgatggatgaaggaatcgatggaagagatcggatctttaatgagcagctggcacgtaccggtgcgggatattttgattattatctgttacatagcgtagaagacggagcaaactacgaaggttacgtcaaatacgactgcttcaactgggcgatgaagaaaaaagaagaaggactgattcgtcatttcggtttctctttccatggaacaccggaactgctggataaaattctctccgagcatccggaggtagagatcgtacagatccagatgaattatgcagactgggagaatccgctggtacagtccggtcgactgtatgaagttcttcgcaaatataacatgcctttcctggttatggagcctgtcaaaggcggttctcttgccagtgcgtctccggaagtagaggcagagatgaaaaagatcaaaccggacgcttccgtagcatcctgggcactgcgctttgcggcatctcttccgggcgttgccacagtattgtccggcatgtccaacgaagagcagatgaatgacaacctgaagacatttaccaacttcgaaccactgtcggaagaagagcggaaagtaatcgaaaaagcacaggatgaactgaagaaaaatccaaccgttccatgtacttcctgccggtactgctgcgatggatgtccacagcagatttccatcccggatgtcttccgtgcgttaaataccatccgtctgtatggagaaaaagatcgtgcacagtcttattatgaaaaactgacacagacttccggaaaagcaggtgactgtatccagtgtggccagtgtgagagtgtctgtccgcagcacctgtccatcatttcattactggaagaagcatcggaaaaacttgacaaataataaaaaacggttcatccatgcccgaaaagcgtgatagatgcgttaaatatgttttctgtattgctttttgtcggggaaaatgttaatatattagcaaatgaacacgaaacaaagaatacctgcagaggtgagaagacgcactgcaggtattcttctgcaacagaaaggaacaacatatgaagacaacactgattatcatggcagcagggattggttcacggttcggaacaggaatcaaacagctggcaaagatgtcggacaacggagagatcatcatggattactcgatctatgatgcaaaagaagcaggatttgacaaagtggtttttgtaatccgtaaagatattgaagaagagttcaaagcggtgatcggaaaccgtattggttctcagatcgaagtggaatatgtatatcaggaactcactgatctgccggaaggctttactgttccggaaggacgtaaaaaaccatggggaacaggtcaggcagtactggcgtgcaaggacgtagtagaagagccgtttgtgatcatcaacgcagacgattactacggaaaagaggctttcgtaaaactgcatgattttctggtaaatgggaagcaggaaggcgaagtcctgaatatggcaatggcaggatttgtcctgaaaaatactgtcagcgagaacggagcagttacccgtggtatctgtaccgtggatgacgatgatatgctgactgatgttctggaaacatccggtatcgcaatcgaagcagacggaacggtagtctgtgacagagaagaagtaaagtcctggatcacaccggatgttcacgtgtccatgaatatgtgggctgcttatccggaatttctggacaagctggagagcggatttgcagaattcctgaaagacgaatccggggatccgttaaagaaagaatatctgatcccgatcatcgtggatggtctgttaaaacagaacaaagcgacagtgaaggtactggagacacaggacaaatggatcggaattacttataaagatgatacagagctggcacaggcaggcttccgtgaaatgattcgttccggtaaatatccgacaaagctgtgggattgattttgagaaaataaaagagaaaatgacaaagcatcagggtgaaaatcggagatatgggaagtcccagaatctgattttaacctggtgctttttcagttacgtggataacggagcaaagtacgttcggtttctgagttcattcataattttacaaaagttcaggaatccgtatggctgtaaaagtgagacaaaaaaggcagataaagaaaaggggatgacattttggaagagtttgtatataatagagaaagtgtcagcgagatgaaaacggaaaaaacgaaggaaacaggagaacagaaaatgaaagcatatgattatgttgtagtaggatccggtctgtacggcgccgtatttgcccgggaagcggtgaaaaaagggaaaaaggtgctggtgatcgacaaacgcccaaacatcgcgggaaatgtatatacggagcagatggaagggattcatgtacataaatacggtgcccatattttccataccaacaataaaaaagtgtgggactatgtgacatcttttgcggaatttaaccgctttacgaactccccggtggcaaattacaagggtgagctgtacagcctgccgtttaatatgtatacattcaataagatgtggggtgtggtgacaccggaagaggcagcagccaagatcgaagaacagagacaggcagcaggcatcaccgagccgaagaatctggaagagcaggcgatctctctggttggaacagatatttatgagaaactgatcaagggttacacacagaaacagtggggacgtccgtgtacagagcttccgtcatttatcattcgccgtctgccggtgcgtctgacttttgataacaactacttcaatgcgttgtatcagggaatcccggtaggtggttatacaaagatggttgccaatatgcttgaaggtatcgaggtagaacttggtgtggattatcttgagaagaaagagtattatgacagtctgggagaaaaaatcgtatataccggaccgatcgatgcatattttgcatatgaactgggtacactggaataccgttcggtacgattcgagacagaggtactggacaaaccgaatttccagggaaatgcagctgtgaactacacagatgcagagactccatggacacgaatcatcgaacataaatggtttgagttcggaaaagatgagaatggtcaggaacttccgaagacagtcatcagccgggaatacagctccgagtggaaaccgggcgatgaaccttattatccggtcaatgatgaaaagaacggaaaactctatgaagaatataagaaacttgctgagaaagaaaatgatgtgattttcggcggcagactgggtgaatataagtattatgatatggatgcggtgatcgcagcggcactggatatgagtgagagagagctgggataattgcattctggtcatgacagacatttatgtataaatatctgaggaaaactaaaaacagtgtagtacaatgtttgatttcaaaccgtactacactgtttttagctaaacaatatatcatttgcgtcgataatcagacacactctagaactcaatctccttcagataccgtgccacagcatcctgccaggtaggaagcggctcgaatccgttttctacgagtttggatttgtccaggcggctgttgaacggacgttttgctttggatacgccgtattcagcagtggtaaccggagcgacggacacgcggtcttcggaatactcctcacgtcccattgcgacagcctgacggaagatttcttttgtgaaatcataccagctgatatagccgccctcgttggttgcgtgataataaccgtatttctctgtctcgatcatgtcgaccagcagtcgtgccagatcgtaggtataggtaggagtaccgatctgatcggaaacaacggtcagcttgtcgtgtgtctttgctacgttcagcatagttttgataaagttttttccgttcttaccgaatacccatgcgatacgcacgataaaatatttatccagagtggaagataccgcaagttctccgtccagtttggtctgtccgtatacatttaacggtttgtaatccttgcagtccggctgccacggttcggttccctgtccgtcaaatacatagtcggtggaaatgtaaaccatttttgcatccagttctttgcagacagaagcgatattagcagttccatctacgttaatggcctttacttttgcctgtttgtcttcatcctctgccagatcaacagcagtccatgcagcgcagtgaacgacaacatccgggttaatctcggtaagggtcttacaaacagcttctttgtctgtgatatccatggcaacgtaaggcatggttgtgaccgggctttcgtcctgtacaccgctgtaggaaggagcgatatcacttccgattccttcataacctctttttgccagttcattcatcacatcgtgtcccagctgtccggcaacacctgttacaaatactttcatattgttctctccataatctatctgccgtagctgcgaagctagtacagcgaatattaagtaaccgccatattgacttgtctgatttttcatctgctgcgttgtcgtcaatcgtcgtagcaccgctacgcctcattcctccgccttgcagatgaagaaatcatcctgcgtcaatatagcagatacttaattttcgctgtactagagtatatgcctggcagaacggcagattttaaatgatttattagttctgtctcacggtacgcaccggcaggaattagcggtttgcgtacattttctcatagtagttctggtattcaccggagatgatggtttcccaccattctttgttatccagataccactgaatggtttttttgataccgtctgcgaatttggtttccggcagccagcccagttcgttgtggatcttggtcggatcgatggcataacgcatgtcatgaccttttctgtcagatacataggtgatcaggctttccggtttacccagttctttacagatgatttttacgatatcgatgttcttcatctcattgtgaccaccgatgttatatacttcgccgacacgaccgttgtggatgatcaggtcgatcgctttgcagtgatcttctacatacagccagtcacggacattttcaccttttccgtatacaggaagtggtttgtcattcagtgcattggcgatcatcagcggaatcagtttttccgggaaatgatacggtccatagttgttggagcagcggctgatggtaacaggcagaccataagtacgatggtaagccagaaccagaaggtcagcacctgctttggaggagctgtacgggctgctggtgtggatcggagtctcttcggtaaagaacaggtccgggcgatccagaggcagatctccgtatacttcatcggtagatacctgatgatatctcttgataccgtattttctgcaggcatccatcaggacagcagtacctttgatgttggtatccaggaatacttccgggttctcgatggaacggtctacgtggctttctgctgcgaagtttacaaccatatccggatgttcttcttcgaacagtttgtatacagcttcacggtctgtgatgctttcttttacaaaacggaagttcgggttgtccataacaggagccagagtggacaggttacctgcataagtcaggcagtccaggcatacgatccgataatccgggtattttttcagcatatggaaaataaagttgcttccgataaatccggcaccgccggtaacaataatattcataacatttctccttttgggtgtcaggcaccattaaaaatttaataacaaatccgggaacgcagcggtattagcggcgtgcatccagatatttgccgttcagaacgtccatcagatactgaccgtactgattttttttcagcagttcgtatacttttagaacttcttcttttgagatccagccgtttaagtaagcgatttcttccagacacgcgatttttctgtgctggtgagtttccatggtttttacgaagttggtagcatctaccagactttcatgtgtaccggtatccagccaggtaaatccctgtcccagaagttctacatttaactgtccttcttccagatagatgcggttcagatcggtaatttccagttcgccacgtgcacttggtttcagattcttagcgtattccactactttattgtcgtagaaatacagaccggtcacacagtaattgctcttcggatgttccggtttctcttcgatggagatggcttttccgtccttatcgaattctacgataccgaaacgttccggatcgtccacgtagtaaccgaagacagtagcaccttttccggtttttgcattttctaccgctgcgtgcagacgtttggtcagtccgtgaccggcgaaaatattgtcacccagaaccatagctacagagtcatcaccgatgaattcttctccgatgatgaaggcctgtgccagtccgtccggactttcctgtacagcataggacagatttacaccgaactgatgaccgtcgcctaacagctctttgaaacgcggggtatcctgcggggtggagatgatcaggatatcacggatgcctgcgttcatcagaacagacatcggatagtagatcatcggtttgtcatagatgggaagtaactgtttggaagttaccatggtcagaggataaaggcgtgtgccggatcctcctgctaaaatgattcctttcatgagtattctcctttcagatcatttgttgtaactattcagtaggtagtatcccgcgaggtgttttggcatgaatatgccaaaatctcgagacatacaagtcaaaatgccatcaccgaaggtttaaatgcattttgactcgtaactgtgaaggtactgaacagttaccatttgttttttcagttccgtatcctaagatgataccattataaaaggtgacctaaggtcaccttcaagtgctttttaaaaattttggtaaaattgttggtttttacttataggacagagaaaaacagaggggaaatttagtaattgcaaataaaaatcccggcatcttttgtgatatgcaatcctttttctgtttttttctttacaaaggaacgaaattctttgtagtggtcaagcaggtactgattctgattgccgtgacaggagaggatataggagatcagaggctccgggtcggataccagaagaccgtcctcataagagatccattccacacgggaaaaccagggttcgagcacgtgtgcgccgttttcacgaccgaatttttcatataatttgttggcggagagcacgatccgctcatcaaaccggctgaccagctgactgatttctttcatatgagagttgccataggtactgcataagaaccgcccacccggtttcagtacccgccggacttctttacacacattttccagattgtcacagtagaacagcacgtggttggcgatcacgaggtcatagctttcggaagaagccggaatcttttcacagtcaaaagcagcgaaagaaaaccgggaatctctggctcccagtgcacgtcttgcatcgcgcagcatcccgtcggagatgtcagagagggtaaggtggatgttttgaggaagcagagagatgttttgtttccataaagcaccgtctccacatcccagttccagaacgttcatgccggactgcagatggcactgtgaatagatccacggaaaccatccttctttatttatagagtataaactgtgcagcttgattcgggctgcaatgttagttgcgttctgatactgattcttcatactcttttccataccggtcagatggatcagatcaagcatctggttccagtcgatggtgtgctgggtctggatcgcatcggaagtatcctgaatcgccttctccaccagctgtaattgttcaatccggtcgcgcaccagtttcagctgtacatccagagaatcccgcataaaatgatagtccgtatcattgatcgtcatatcccggatatcatccagcgaaaatcccagaaacttcaacaacaggatctgctgcagccgcgccagatcctcatccgtgtaaaaccgcgcaccggcatcacttacataggaaggttttaaaatattctgtttatcataataacggatcgtccgaagcgtcacatgcgccatacgggcaaattccccggaagagtagtagccctcttttttcatagattatacgcctttctgtgtatgaaaaaataattacgaaaatagataaaaacagtatagcagacggggggagagaaagcaaattggtctttttcgataaaaacgaaaaaccccgtgtgataaaaaacaaaaatagcaggaaatagggagaaatattcgtgacaaaacaacagactgatggtagaatattccagataaggagtgtcatggggcatgcctgctttttgatttacgcgagcaacgagccaaagtccgtgcttgcacgagaccttggcgactgccgcgataacgagcgccagcgagtgtacgcgagcaacgagtcaaagtccgtgcatgcacgagatctgggcgactgtcgcgataacttgagaaactcgcggagcgtgtttctcatagtttatttgagctacaagtcaaaatctgacctcgtatgaaaccttgatgatcgccatgacaacgagtaaaattttcggagtgtattttatctcgttttggagaaagttttatggagataggacatcaggaagcattgtggtcgggatgcatggcacattcttataaaagtatatttaaagacagaataaacaggacagaagggggatttatgctgggaaacgtaaggaaaaaatttattggagacaagcagttttataagatggtacttgccatcgccataccgatcatgatccagaacggaatcacaaactttgtaagcctgctggacaacattatggttggtcagatcggaacggagcagatgtcaggggttgcgattgtcaatcagctgatctttgtatacaatctgtgcatcttcggcggggtgtccggtgcgggaatctttaccgcgcagtattttggacagaaagatgatgaaggtatccgccataccttccggttcaaattatgggtatccgcgattctgactgcactggttattgtgatttttatcatcggtggagaaagtctcatccagatctatctgaacggcagtagcgatggcggtgatctggcggctgcacttcgctatggaagacagtacatgctggtgatgttatgcggactgccggcctttatgatggtacagacatatgcgagtacacttcgtgagtgcggagagacgatggtgccgatgaaagccggtgtgacagcggttctggtaaatctggtatttaactatctgctgatctacggaaagttcggttttccggaactcggtgttgtcggtgcggcgatcgcaacggtgctgtcgagatatgtggagatggcgattgttttaatctggacccacaaacacaaagaaatcaatacctatatcgtcggactctacaagaccatgaagattccgggatatctgataaagaaatttattatcaaaggctctccgctgctctttaacgagacactgtgggctgcagcacaggctacactgatgcagtgttattcggtgcgcgggctgagcgtagtagcggcgttcaatattgcgaatacgattgcaaacttatttaatgtagtatttatcgccctgggtgattcggtagccatagtggtaggacagaggctgggtgccggcaagatggatgaggcaagggatctggacaacaagatgatcgccttttctgtgatgtgctgtaccggtgttgcgattgtgatgttcctgatcgcgccgctgtttccacagctgtataacactgacagtacgacaagacatctggcagaatacctgatcatgacacaggcagtctttatgccgcagaatgcattcctgcatgcgacatattttaccctgcgttctggtggcaagacagtagtcacgttctttttcgacagcgtcttcgtgtggatcgtcagcgtgccgatcgcctttgtgctgagccggtttaccggtttgtttgtagtagtgattttcgcatgcgtcaatattgcagactggatcaaatgcgtgatcggctttgtactggttaagaaaggcgtctggttgcagaatattgtgtcgcagaaagaatgataaacagtttcgggcatggtgaacaataaaaagaaaaatagcagaaaaataagacttgcaatttaaaatatggtagtgtataatatttgacgtatgaataaacgagatggtcctctgttacaaaaggtattaagaacatccaggaacaaaaggagaaaaaagatgaacgaaattattaaaaacatcgaagctgctcagctgaaagcagaagcaccggcattcaacgttggtgacaccgtaaaagtttatggtaaaatcaaagaaggaaaccgcgaaagaattcagatcttcgaaggtatcgtaattaaaaaacagggcggaagctgccgtgaaactttcacagtaagaaagaactctaacggtatcggcgtagaaaaaacatggccgctgcattctccgaacgtagagagagtagaagtagtaagacgtggtaaagtaagacgtgcaaaactgaactacttaagagaccgtgttggtaaagcagctaaggtaaaagaactggtaaaataattcacaggtagaggagcaggggcaaatacatcatgtacttgcccctgtttccgtttacgcgggtaatgagtcaaagtccgtgcttgcacgaggtcttgacgactgccacgataatgagtaaattttgcgaagagtatgttatctcgttatcgcgttactgtgggaaaactctgaggcaaatgaatatgggattttttaaagcaaggtatgtaagagactatgtggcagctgcgaagttaaaagcagctgttatctgggcggcagagatcgcagcggtgcttatcctcggcattgtactggcggttggttatggaaaaatcaccgttatgcaggaaggttctatggatcctacgttaaatgcaggagatgtacttctggtcgatcgcatggcatacagattcagtacgccgaagaggggagatatcatcgtatataaaacaggcgatgataaaaaagcaagtacacatatcaaacggatcatcggacttccgggagagacgatacagatcaaggacggacagatcctgatagacggggagacctatcaggaaaacggcgaatttccaggaattgaaaatgcaggggttgctgagacgaaggtggcactggacagcggagagtattttgtgctgggtgataaccggaacaacagtgaagacagcagatacgccgatatgggaaatgtcaagaaaagaaatatcatcggtaagatctggtttattgcgtcaccatggagcaggttcggattcgtatagaatgaggtaagcagatgaatttacaatggtatccaggtcatatgaccaaggcaaaacggcagatgcaggaagatctgaaactgatcgatctgatcatcgaactggtggacgcacgcatcccgttaagcagcagaaacccggatattgatgaactgggtaaaaataaggcaagactgatcctgttaaacaaatcagatcttgcagatgaaagatataacgagcagtggtccgcgtatttccagaaaaaaggattttacgtggtaaaagtgaatgctaaatcaggcgcgggactcaagtctatccagggcgtgatccaggaagcttgtaaagcaaagatcgagagagacagaagaagaggaatcaagaaccgtccgattcgtgcaatggttgtaggtattccaaatgtaggtaagtccacatttatcaactcctacgcaggaaaagcctgtgcaaagaccggaaacaaaccgggtgtgacaaagggaaagcagtggatccgtctgaataagacactggaactgctggacacacctggtatcctctggccgaaatttgaggatcaggaagtgggaaaacgactggcgtttatcggatctatcaaggacgagatcctgaatctggaggaactgtctctggaactgctggattatatccgcacgaattatccgggcctgttaaatacccgttacggtatcgaggaagagggcacaccggtatctcttctggaagcagtagcggataagagaaaatgtctgatccgcgggcaggagatcgactatgcgaaagcggcaggaatcgtgatggaagaattccgtaacggtaagatcggaagaatcacactggaatttccaccggttgaggaggaaactgcacatgaagaccatccgggagattaaagaagaattacaggcggcgtcgggaacagagagagaaaaacttctggaattgtaccgggaggatacccgaagcggcgtagtcggtctggtgaaaaaatacgatcgggaaaaagaactgctggagaaagaaaaacagcggattgaagatatgaaagtctatgagaacacctacagtcacgtgggctggatctgcggcatcgatgaagcaggacgtggcccgctggcgggacctgttgtggcaggtgcggtgatcttgccggaagacagcaagatcctctggctgaacgactccaagcagctttcagcaaagaaaagagaagaactctatgatgtgatcatggaagaagcgatcagcgttggtgttgggtatgcaagtccggcacgaatcgatgaaatcaatattttacaggcaacctatgaagcgatgcgtgaagccatctcaaaactggctgtcaagccacagattctgttaaatgatgcggtgacgatccctaagatcgagattccacaggtgccgatcatcaaaggggacgccaaaagcgtttcaatcgcagctgcaagtatcatcgcgaaggtcaccagggatcggttaatggcagaatatgataagatcatgccggaatatggatttgcatctcataagggatacggatcgaaaagtcatatcgaagcgattcggcaatacggtccgtcaccgatccacagagcaacatttatcaagaactttctgtaatccgggatggatgaagctactgattttggatgaaaatgtctgaaaacaaaacagatcacgtaattcagttttctgtaaaataagaggaaactatatttgaataaaagaaaaacaggacaggagcaggaggtgaaagccgcctgcttcttgaaaacacagggataccagatactggaacgaaattaccgctgcaaaaaaggagagatcgacctgattgcccgggaggggcagtatctggtatttgtggaagtgaaatacagatcaacaaacgaaagcggtctgccggaagaagccgtagatctgcggaaacagcgacagatctcccgggtggcagcctggtatctgacagagaaaggtctggatatctatacaccgtgcagattcgatgtggtggcgattgagggagaagagattcggctttaccgggatgcatttttctaccagggttaaaagaagaaatctgggagacagaaacatctgcaaatatggaaaaacggatagaaagtctttcaaaaaagatgaaatacagaaaacaaacagccagtatcagaaaataaaacagtacagcaggagagcagattatggagattcattggaaacaggaatatacaggagatatggaagtcagaaaacgtgatggtgtaacttacctttcttatccaagactggaacgggaatccgccattgtacacggtttcagcacccgtctgggcggtgtgagtgagggctgtctcggaagcatgaatctcagcttttccagaggtgacaacccggaaaatgtactggaaaattaccggagaatcagcagagccatcggatttccggtagaaagcatcgttacttctgatcagactcatacgacaaatgtgcgccaggtaggaaaagaagactgcggatgcggcgtcctgacaccacggacctttcacgacatcgacggcctgatcactaacgagccgggtgtaactcttgctacgttttacgccgattgcgtccccttatatttctatgatccaacccacaaagccatcggtctgtcccattccggctggcggggaactgtaggaaacatcgcaaaagcaaccgtagaagccatgcagaaagcctatcacaccgacccggcagacctcatcgcagccatcggtccctccatctgccaggactgctacgaagtaagcgaagacgtcatcgaagaattccgccaggcttatccggaaaccctccacaaaaagctcttctaccggaaacccaacggaaagtaccagttaaacctctgggaagcctgccaccagaacttcctcaccagcggtatacgtgaagaaaatatcctcacccccaacctctgcacctgctgcaaccccgatttcctctactcccaccgcgcctcccacggcaaacgaggaaacctcgcagccttcctgggactacgataaagaaagaaccatatacatagaaaaacactgtgtacgctcaaataaccattattataatggaaaattgagttgttacacagtgtttttatgtacaaatataatgtgattatatgcagaaaattactatcgatatatgcatttaaagacaactatctaaaaacatcaaacaccttccgaaaagtaatcgaatttccgccaacatcagtaaacgatccggggatcaggggctggaaacactttgtgagcggttagagaaagattttagatccggcgcttagaagaacttgacagtgagcggctctccgcgaactggcacatagttcttcttagcgactagctaaaattttctctgctcacgtttccagcccctgatcccccgggtcgtttacgtacgccttaaaaaaacttttctaagaaactctattttttctcttctctgttcttagcaagcaattttgtaatcttagaagtcgtagaccgaaccttctcaaccgaaacatcatgattcagagtatccataatacttgccagatatttacccatagcagcaggctcataataaggacgatccaacaactccggtgtatgataattcaggtccgtagtaatcactttatggatataacccttttcataatactcatcaaacttctccagcccatctgtaaacagaccaaacgtagtacaaacaaatacacgatttgcattccgatctttcagctgttttgccacatccagcatgctctcgccggaagaaatcatatcatcaataacgatcacatccttgccggctacagagtcgcccaggaactcatgagcaacgatcgggtttttaccatttacaacggtagaataatcacgacgtttgtagaacatacccatatcaacaccaagaatattggagaaatatacagctcttgccatagcaccttcatccgggctgatgatcatcagatgttcgttgtcgatctgcagatccggtacggaacgaagcagcgctttcaggaactgataagtaggcatgaaattatcaaaaccggacagcggaattgcattctgtacacgaggatcatgagcgtcgaaagtgataatattggaaacacccatgctaaccagctcctgcagagccattgcacagtccagagattcacgtttgctgcgtttatgctgtcttccttcatacaggaacggcataacaacgttgatacggtgagcttttcctgtagcggcagcgatgatacgtttcagatcctggaaatgatcatccggagacatatgattttcatacccatttactttataagtgatactgtagttggtgatatcgcaaagaatgaaaagatccactccacggatagattcgttgatgacaccttttgcttcaccggtaccgaaacgagggcagtcacagtcaataaggaaagattcctctgcatatcctgaccatgcgatgccgttagtccggtgctccataagctctttacggaactgaaccagataatcattgacggtttttcccagttcttcacagcctttcagcgctgcgattttaataggtgcgactggaatggatttttccaataagtctaagtttgccataataacctccaaataaagtgatttaacctgttgtattttacacgatttttacagacataatagttataccattagaaactaaagcccgtcaagaatatgtagaattcttgtgaaaaataacgggaaaaacagtattttccggcttttccttgacaattcggggcggtttctatatagtaaggtagcggaaagaacctgaaaatgttcgtaagtgttcaatacttgtaactgttcagtaccctcacggttacgagtcaaaatacctcgcggaatatttccggtggaatagttataattgttcttaccaggagaacggagaaagttgaatgaaaaaaaacaaacatattataaagatggttcagcccgggagtatagccgaagaactggagatcgaaccgggagatgaactgatttccatcaatgaccagaagatcgaagatgttttcgattatcattatctggtaaacgatgattatctgacagtactgatccgtaagaccaacggggaagaatgggaactggagattgaaaaagattatgaggaagatctggggatcgagttcgataatggactgatggatgaatatcgttcctgcagaaacaactgtattttctgttttatcgatcagatgccgccggggatgcgggaaactttgtattttaaagacgatgattcccgtctttcttttttgcagggtaattatgtaacacttacaaatatgagtgatcatgacatcgaccgtatcataaagtaccatctggggccaatcaatatttctttccagacaaccaatccccagcttcgctgtaagatgctccataaccggttcgccggggatatttttccaaaggtgcaacggttatacgaagccggaattgaaatgaatggtcagattgttctgtgtaaaggcgtgaatgacggagaggaactggaacggagtatccgggatctcagccggtatctgccgcatcttcgaagcgtctcgatcgttcctgttggactgagtaaatacagggatggtctgtacccactggagccatttacaaaagaagatgctcaaaatgtgctggaatgcgttcacagatggcaaaaaatgctgtatgctgaatatggcctgcattttattcattgcagtgacgaatggtatatcctggcagagcagtccatgccgccggaagaacagtacgatggatatctgcagctggaaaatggcgtaggtatgctgcgacttttggatactgagatacaggagacggtgcaggggctggagggaaatgacacgcttcgacatttttcggtagcgaccggaaaactggcagcaccttatatagaaaagaatatttcgtatgttcaggaaaagtttccgaatattcatgggacggtctatgcgatccgaaacgacttctttggtccgatgatcaccgtatccggtctgatcacaggacaggatctgatcgcacagctgaaagatcaggatcttggggaacgacttctgatcccgtgcaatatgcttcgtgcgggagaaaatgtgttcctggacgatattaccgtagaagaagcagaagaagcgttacagataaaaatcactgtggtaaatgaagatggtgcatcttttgtacacgcagtggtagatgatacaatattggaaaatcataaaaggaggcagatctatgagcaagccgattgtagcaattgtgggacgacctaatgtgggtaaatccacattattcaatgccctggcaggagagactatttccattgtaaaagatacaccgggtgtaacaagagaccgtatctatgcggatgcaacctggttaaactacagttttacactgatcgataccggcggtattgagccggagagcaaggatgtcatcctggcgcagatgagagatcaggcacagatcgcgattgataccgcagatgttattatttttatcaccgatgtgcgccagggactggtagatgccgattccaaagtggctgatatgctgagaagaagtggcaaaccggtacttctggtggtgaataaagtagacagttttgcaaaattcatgccggatgtatacgaattctataatcttggcatcggcgatccgattccgatctccgcatccagcaagctgggtatgggtgatatgcttgacgaagtggtaaaatatttcccgaccgaagaagaggaagaggaggaaaatgagattcctcatatcgctatcgtaggaaaaccaaacgtaggaaaatcctctattgtcaataaattactgggacagaaccgtgtgatcgtatcaaatgttgctggaaccacccgtgatgccatcgataccaacgtgatgtggaacggaaaagaatatgtatttatcgataccgcaggtcttcgaagaaaaaataagatcaaagaagaactggaacgttacagtattatccgtaccgtaacggctgtagaacgtgccgatgtggtcatcgtggtcatcgatgcggtagaagggatcacggaacaggatgcgaagatcgccggtattgctcatgaacgtggaaaaggtgttatcattgcagtgaacaaatgggacgcggtcgagaaagatgataaaaccatttacaaatatacaaataaggttcgtgaagttctggcgtacatgccgtatgcggaaatcctgtttatctccgctcagaccggacagcgtcttccaaaactgttcgagacgatcgatatggtactggaaaatcagacactgcgtatccagaccggtgtgctcaacgagatcatgacggaagcgatcgcgatgcaacagccaccgtcagacaaaggaaaacgtctgaaactgtactatatgacacaggtatccatcaaaccgccgacatttgttatctttgtcaatgataaagaactgatgcatttttcttatacccgttatcttgaaaacaagatccgtgaagcattcggtttcagaggaacttctctgaagtttattattcgggaaagaaatggtgaaaaataagaattattagatccggggagggatatttatggaacggattctctgtgttctgatcggatatatctgtggacttttccagacctcttatctgtatggaaaagtacacggtatcgatatccgtaattacggaagcggaaatgccggaacgaccaatgcactgcgtacactgggcgcaaaggcaggagcaatcacactgcttggagactgttttaaatgtgtgatcgcggttgtgatcgtacatctgatttttggaaaaagccatccggagatgatccggctgctgggaatgtatgcggcagcgggaacgatcctcggacataattttccgttttacctgaactttaaaggaggaaaaggaattgctgccacagcaggtctgctgttatcgtttgatctgcggctgacactggttgcagccattgtgttccttgcagtatttttccttacccactatgtatcactgggatctctgctggtttatgtggtatttgtggcaggtatcattatcatgggacagaacggacaatttacgggaatgagtcaggcaaatatttatgaaatgtatgtgcttgccatcttgcttgccatccttgcatattacaaacactggccgaatattctgcgtctgatccatggaaatgaaaataaaacatatctgaaaaagaaaaaagcataatggaggtgtcgtatgaagaaaatcggcgtactgggagccggaagctggggaactgccctcacgtggcttctgacaaataacggacatgaagtaactttgtggtctatcatggaagctgaagtggagatgcttcgcacaaaaagagaacatacttccaaacttccgggtgtaaaactgcaggaaagtattcagttgacaagcaatctggaagaagcaatggcagacaaggatgtactggtactggcagtaccgtctccatataccagaagcaccgcacagaagatggcaccatatctgaaaaaaggccagatcgttgtcaacgtggcgaaaggtgtggaagaacatacgctgatgaccttaagtcagatcatcgaagaagaactgccggaagcaaatgttgccgtattatccggtccgagccatgcggaagaggttggaaaaggtcttccgacaacctgtgtggtgggagcgagaacgagacagatagcagaatacctgcaggaaatcttcatgagtccggttttccgtgtttacacaagtccggatgttcttggtatcgaactgggagcggctttgaaaaatgtcatcgcgctggccgcaggtgtagcagatggtcttggctacggagacaacacaaaagcagctctgattaccagagggatcgcagagatctcccgccttggtatcgcaatgggtgcacatgcgagaaccttttacggactgtccggtatcggtgatctgatcgttacctgcgcaagcgtacacagccgtaaccgtaaagcaggttatctgatgggcaagggatataccatgcaagaagccatggatgaagtcaagatggtggtagaaggggtatattctgcgaaggcagcactgggactggctgaaaaatatggggtggaaatgccgattattgcggaagtcaataaagtgttgtttgaagataagagcgctgcggatgcggtgaatgagctgatgcagagaatgaaaaaggatgagcttggagttgaactctgggacgatgagaaatagaagagtgatgtaaaacggacgcccgcccgggaatcattcccgggcgggctgttttttatataccttaatcctttagatcacgaatccctgcatatcctccggtatccctgcacttctgaatttctcatccagggcatcgatcgtcttcatttccatgtcggtcagttcgaaatcaaaaatatctgcattttccgcaatcctctcaggatttaccgacttcggaatagcagagattcctttctgtaccagccaccgcagacctatctgtgccggcgattttccgtaagtttctcctatatgaatcattgtatcttttttgagataagccccacgggcaagcggtgcataagcctgtacggcaatgcctcgttccttacaatactcgtacaggtctgactgattccacagtggatgatactctatctgattcactgccggaacgattccggaagtctgaaacagtgcttccagatgggaaatctcaaaattacttacgccaatcgcttttgcctgaccggattcccggatacgctccagcgcctgccaggaattgataaaacaaccaggtaccggccagtggatcagataaagatccacataatcaagtccgagtcgatccagacttcgttgaaaggctccgtcaatatctccgatccgctgtgcggtattccataattttgttgtgataaaaagttctttccgtggaacagaagaagaacggatcccccgccctaccccctcttcgtttttataagcagaagctgtgtcaattaaccgatagccaagatccagagcggtggcgatagcgccttctacttcaccgggtgcggtagctttatatacgccaagccccagaagcggcatgctggcatttgtgttcaaagtcaatgatgggatgtttgacatgatgtaaacctcctctcgtaacatccggcatttccgaaaagcacaaaaatgaccgaaaatcccaatttctatccattataccatagaaatgtgaaataattagggcgaaaatattacgaagctgtgacatgaaggcgatacggaagatcaaagaccctatccccgggataggataaaccatcaacgatacatgttaacgaattaacaaagcaaagcgtgaaaatcggagactgcgtcatttcttacaaaaatcccctgttgtatctaaaaaagtacagctgaatttataaatattttgcatagattctattgaataccatagggaaaaggagtataataaaacataattgacaaaagattgtcatatcccccattgggggaaaagcagagaaaggagtaggacatgcacttattaaaagatgagaacggaaatgtaattccacatggtgatggccctgcccataaacatgagcatgaccatgaccatggatgtgaagaacatgcatgcgacggatgcagtggcggttctgacaaatgtaagaacgaatctgtagcactgttaaactatatggtggatcataacgaacatcatgcagcagaactcgatcagatggctgacaacctggcaaaactgggtatggatacagctgcaaagcagatcaaagaagcagtagctgatttccagaaaggcaatctcagattgcgtctggcactcacaacagtaaaagaagagctgaaagagttttaatcagtgttttacagactgcatatgacatcttggtaaaaggaggaatagcaaatgtgtctggctactgtatataaagaaagcgatgataccgtcatctgccggaatgtaagcaagattctggtagagggtgaaaaagttattatccgcgatatcatgggagaagagaccagcattgaaggaaagattctgatggtcgatctcgcaaacagcattgtaaaattacagtgcgattaatgataaggtcataagatgtaataatcttataagatagattctaactattcagtagatagtaactgtgaagaaactgagcagttacgatagattctatactgataaggcagaacttaataacaagaaactatcagaaaggataagaaaatgtcacatgtaattgcagtcgcaggaaaaggtggagttggaaaaaccacactgtgtggacttctgattcagtacctctgcgaacagaaaaagggaccgattctggcagtggatgcagatgcgaattctaatctgaatgaagtactcggcgtagaggtagaagctacactgggtgatatcagagaagaaattgccagagcggaaacggcaaaagaaaatccgattcctgcgggagtgagcaaggctgattatgctgagttcaaatttaattccgcgctgatcgaggatgatgacttcgatatgctggtgatgggacgtacccagggaaaaggatgctactgctttgtaaacggactgttacaggcacagcttgccaaactgcaaaacaattatccgtatatggttgtggataatgaagcaggaatggaacacatcagccgcggagttcttccgaatatgcagactgctattttagtcagcgactgttccagaagaggaatccaggcagtgggacgaatcaaaaaactgatcgaggaatgcgatatgcatccacagcagatcgggctaatcgtaaaccgtgcgccgaacggtgttcttaatgaaggaaccaaagaggagatcgagatccagggtctgaaccttctgggtgtggttcctcaggatgaactggtatatgaatatgactgcgaaggaagaccaaccgttgaacttccggaagattcaccggttcgaaaagcgatgagtgaaatcgtcaaaaaactgaatttataattcattatcaatgcggatattaccggagagataatctccggagtgtcttcgcccggaagatacacaaaaccacacttccgggtgaaagaatatataatagccataaaagcggagaaaagcggaggaatggctataaaacaaaaggaggaaaaaaatgagcgaatttaagatgactaccgttgaagagatggaagcagccaccaaccgtctgttggaaacgggagcaaaagtaggagctgacgcatggcagttccgtgtaaaaaaccagacaccacactgtaaatttggtgaacagggtgtctgttgtagaatctgtgcaatgggaccttgccgtattaccccgaaggctccgagaggaatctgcggatgtgatgctcacggtatcgtaggacgtaacttcctgaaatttacagcagctggagcagctactcactctgatcatggtcgtgagatctgccacactctgtactgtacagcagaagacggaaactacaaagtaaaagatcctgagaaactgcttcgtatcgcaaaagaatggggcgttgagacagaaggaaaagatatctatgatctggctcatgagatggctgagatcggtctgatggaatatggtaaaccattcggataccagagattcctggacagaatgccggaaggacagaaagaaaaactgatcgagaacgagattgcaccgcgtgcgatcgaccgtgaagtttccacttccttacatatggctcatatgggatgctcttctctgccggaagcactggtaaaacagtctctgcgtgccggtatggcagatggatggggcggttccatgatgggaacagagttctctgatgtcctgttcggaactccgaagccaatcgatacagaagcaaacctgggtgttatggtcgctgaaaacgtaaacatcgttgtacacggacatgatccgagtctttccgagatgatctgcgaatatgctgacagcccggaaatgatcgcatacgcaaaagaaatgggagcaaaaggaatcactgtatccggtgtatgctgtacttccaatgaagtagctatgcgtcgcggtattccgatggcaggtaacttcctgcagcaggaaaacgttgttctgacaggtgcatgtgaagcaatcgttgtagacgtacagtgtatcttcccggcattaggacctctgagcaaatgtttccatacaaaattcgtaacaacttctccgattgcacagatgccagattctgaatttatccgtttcaacgctgagacagcaggagaaaatgcaaaagcaatcgtaaagatggcaatcgaaaacttcaagaacagaaaaccggaactggtacatatcccggatatgaaagcaaaagcaaccgttggttattctgtagaagcaatcgtaaaaactctggatggagttaccaacagccaggttgacgaaaccggaacaacaaaaccacttctggaatgtattacttccggtgttatccgtggtgccgttgctatggttggatgtaacaatccgaagatccgtcctgactatgcgcatatcgaactgatgaagaaactgatcgcaaacgatatcgttgttatcgcttccggatgttccgcacaggcagcagcaaaagccggtctgatggacaaatccgcaaaagatatctgtggtgcaggtctgaaacgtgtatgtgaactggcagatatcccgccggtactgcacatgggatcctgtgtagatatctcccgtatgatgatcctggcggctgaacttgctaaagattccggtctgcagatcaatcagcttcctgtagttggatgtgctcctgaatggatgtctgaaaaagctgtatctatcggtaactacgtagtaggaaccggtatcgataccttcctgggtgttgatccttacgtatccggttccagtgaaatgtgtgaactgctgacagaaggaaccagaaaatggactggcgctgcttatacagtagaaacagacatcgaaaaactgactgatctgatgatcgaaagaatcgaagagaagagaactgctcttggtatttaatcgataagatcgctcatctgtatgatgccgggatctggaatttccaaacccggcatcggatacaaatataatgataaggtggatgactaattatgaagattgcagttaccggtaaaggcggcgtgggaaagacaacgtttgcggctactctggcgcgtctgtatgcggaagaggggcggcatgtactggcagccgatgtggatccggatgcgaatctgggactggctcttggattttcagaagaagagctggatacgatcgttccgatcagcaagatgagaaaacttgtagaggaacgtaccggtgctggaccggataatcagtattacaagattaatccgaaggtagacgatattccggatgcatacggaaaagtgtgcaacggagtaaaactcctggttcttggaactgtggagactggcggtgccggatgtgtctgcccggaacatgtgatgctcagaagaattattaacaacctggtacttcacagaggtgatgtagtggtgctggatatggaagccggtctggaacatatgggtcggggaaccacagaaggtatggatcagttcatcgtagtgatcgaacctggatcaagaagtgtacagacttacaagaatgtaaaacgtctggcaaaagatctcggtgtgaaacaggtacacgtggttgccaataagatccgggatgaaaaagatgaagaatttgtaaaaacacatattccggcagaagatctgctgggattcattcactataacacggagattatggatgcggaccgtcagggctgttctccatacgactacagcaaatcggcagtagacgagatccgtaaaatcaaaacgaccatcgataaaatcgatgattgcgataaataatcgtttaggaggaaaaaacattgacattatttgaaagagtattcaatggaaatgatgctgtatacggtctgactgaacaggcaattgatgcagcaattgcgcagcatggtgaagagaaagcagtcagctttccaaacactgcttactgcctgccttgctattacgctgtaacaggtgtaaaagttactaatctgaaagaattaaaggaagcactgggagttgttaaaactctgatgacaagagaacctcgtctgaatgacgcttttatgtctggcgttgctacagcactgtgtgcggaatttatcgaagctttaaaatatattgacggtgctactccatacgaagagccattatacggacatctggcagatgcagtgatccgtgagctgggtgtaccgcttgtaacaggtgatatccctggtgtagctgttatcctgggatccgctcctacagtagaagaaggtgttgcactggtaaaatcttatcaggcacagggtatcctggtaacactggtaggcggtatctgtgatcaggtagcagaagcaggtatggctacaggcgcaaacgtacgtgttattccgctgggcaaagatgttacatctgtaattcacgtagtatccgtagcactgagagcagctctgatcttcggtaacgtaacacctggtgattccaagactctgatggaatacaccatgcagcgtgtaccggcattcgttaacgcattcgctcctctggatgacgtaatcgtagcatgtggtgctggtgctatcgcactgggattcccggtaatcaccaacgaaacagaaaatatcgcaagagttccgaagagcctgatcgttcaggaagatgtaagcaaattcaatgcaacatctctggaagctcgtgatatcaagatcaagatcacaaacatcgatatcccggtagcattcgcatccgcattcgaaggtgagatcattcgtcgtggtgacatgcaggttgaattcgatggttcccgtgttgactgtgctgagctggttcatactgttgatgccagcgagatcgaagatcataagatcacagttgtaggaccggaagtagacgacatggaactgggaagcaaaaacagcattgcatatgttgttaaagttgccggtaaaaacatgcagcctgactttgaaccggttatcgagcgtaaattccataactacatcaactgtatcgaaggtgtataccatacaggacagagagatatgcagcgtatccgtatcagcaaaaacgcatttgctgcaggattccgtctgaaacatatcggtgaagttctgtatgcatccgttaaaaatgaatttgaagcagttgttgacaaatgtgaagttattatttacacagaccctgcagagtgtacaagaattcgtcacgaagttgctatcccgacattcaacaaacgtgatgatcgtctgaaaaatctgacagatgaatctgtagatgtatattacagctgtatcctgtgtcaggcattctccccaagccacgtatgtgtggttacaccggaacgtctgggactgtgtggtgccgtttcatggctggatgcaaaagctaccaacgagctggatccgaacggaccttgccaggtaatcacaaaagagcgtccgatcgatgaaagaatcggtgaatatgaagacgttaatgaggctgttaagagactgtctcagggtgctctggaagatgtatccctgtactctatcatggaaaaaccaatgacatcctgcggatgtttcgagtgtatctgtggtatcgagccattctccaacggtgtatgtatcgccaaccgtgagtacgctggtatgactcctctgggaatgaccttccctgaactggcatctatgacaggtggtggagttcagacacctggattcatgggacacggaaaacacttcatcggctctaaaaagtttatgaaagcagaaggtggtatcgaacgtatcgtatggatgccaaaagaactgaaagaatttgtagcagacagactgaaccagacagcaaaagaactgtatggtattgataacttcacagatatgatcggtgatgagactgtagctacagatccggaaactctggtagaatttttaacagaaaaaggtcatccggcacttggaatggacccgatgatgtaatataattagtaatggaagaaagtggctgacaaatgcctggcatttttctatgccaaatgtcagaggattgtcagccataaataaatattaaggaggctaatgagaatgccgtttaatcgtaaaccacagaaatttaatgcatctatcaaagaagtaacaattggatgcggtgaaaaagcagtcacattaggaggggaaaatgtttatcctttctactcatttgatggagaaatcaccaatgcaccaaaagtagccgttgaaatttccgatatgggagttccggaagtagcaggtctgaaagcttactatgaaggatgttctaccatggctgaaatcgcaaaacgcgcttctgaaatggaaggtgctgattttgtttgcctgcgtctggaaggcggagatccgaacggagcaaacaaatccgtagacgaactgattgcagttgtaaaagaagttgcagatgcaatcgacgtaccgttagctgtagaaggctgcaaaaacgtagaaaaagatggagaacttcttccaaaagttgcggaagcactgcagggcaaaaacgctctgatcctttctgcaagagaagaagattataaatctgttggagcagcagcaggtcttgcttacgatcagaaagtaggagctgaatctgcagtagatatcaacctggcaaaacagctgaacgtagttactactcagctgggtgttaaaccggaaagcatcgttatgaatgttggttctgcagccgttggatatggttatgaatatgtagtatctactatggaccgtatcaaagcagcagcgctgtctcagagtgatgccatgctccagatgcctatcattacaccagtatcttccgaaacatggaatgtaaaagaatccatggcttccgaggaagatatgccggaatggggaccagtagaagaacgtgcaatttctatggaaatcatgaccgcagcagccgatctggcctgtggatctgatgccgtaattttaatgcatcctcagtctatagcaaccatttctaaaatgattaaagaattagtttaagtgtaagcgatagaacaggaggataaaaactatggcattatcaggtattcagatttttaaaatgttaccaaagaaaaactgtaaagaatgtggatgccctacttgtatggcattctctatgaaagtagcacagggcgcactgaaaatcgaacagtgtccacacgtttcttcggaagctctggaagctctgtctgaagctactgcaccgccaatgaagaccatcaaagtcggaacaggcgaaggagagtacacactgggtggagaaaccgttctgtacagacatgagaaaacatacgtaaacaaaacaagatacgcagtatctctgtgcagctgcatggacgatgctactatcgatgctaagatcgcagctatcccggcagtagattacgaacgtatcggtgagcgcatgcatcttgagatgatctatgttaactatggcgctgaagccggtgcagacaaatatctggaactggtgaaaaaagctgttgctaccggaaaaactctggtactgggttgtgacgacgttgaagttgcaaaagcagctctggaaatcgcaaaagccggaaaaccgattctgaatggtgcaaatgcttccaactacgaagcaatgaatgctcttgcaaaagaagcagatgttgttttaggtgtaagcggtgcaaacctggatgaaatctatgacactgttgcagctctggaaaaagcaggaaataaaaacctgataatcgatgcaacaggagcttctctcaaagagacttatgcaaacgcagtacagattcgtcgtgcagcactgaaagatcaggacagaactttcggttacccgactatcgtaaatacatccaagctggctgtaaaagacaaatatatgcaggaagcactggtttccctgttcacaatgaaatacggttctatcgtagttgttgacgaactgggatatgcagaagctctgcctctgtttggtctgcgtcagaacgtatttaccgatcctcagaaaccaatgaaagtagaaccgggtctgtatccactgaacggtgcagatgagaattctatctgtctgacaactgtagacttcgcacttacatatttcatcgtatccggcgagctggaaagatcaggagtacctgtaaacctgatcatcaacgatgcaggtggactttccgtactgacatcctgggcagcaggtaagttctccggtacatccatctctactttcgtaaaagaaaacatcgaaggtaaagtaaaatccagaaaactgatcattcctggtaaagttgccgttctgaaaggtgatctggaagcaaaacttcctggatgggagattatcgtagctcctctggaagcagtacagctggttaaattcctgaaagatatgaaagaagcaggcgaactgtaagatttctgattcctcaggaataccggacatgtgaagaaagaccggaatcctcctcgcggggattccggcaaataaatataattaaaggagacacacactatggcaaaatttgtaacaattggtgagagactttccaccacagctccggcagtaaacaaagcatttatggaaagagatcctgaaccgatcctgaaaagagcaaaacagcagctggatgctggtgctgtatatctggatgtaaacatcggacctgctgatggatacggcgaagatctgatgaaatgggcagtacagttactgcagagcgaattcgataacgttccgctggcactggatacttccaacaaagcagctatcgaagctggtatctctgtatacaaccgttctaaaggaaaaccaatcgtaaactctgcagatgcagctggaagaatcgagaacatcgacctggcagcagcaaatgatgccattgttatcgctctgtgtaatggtgaaggaatcgctgcagacaacgacgaacgtatgggttatctgacaatgcttctggaaagaggtctggaacatggtatggcagaaacagatatgtggttcgatcctctgttcctggtagtaaaaggaatgcaggacaaacagatggaagtcctggaattcatcaaaatgatctccgacatgggactgaactccacaggtggtctgtctaataactccaatggtatgccgaagaacatccgcccgatcatggactctgcactggttgctatggctatgatgaatggtctgacatccgcaatcgttaaccctaacgacctgcgtctgatggaaactatcaaatcctgtgatgttttcaaaggcaatactctgtacgcagattcttatctggaactgtaagatgcgcacagcggcgtacaaagtagatgtcgcaagcgaccgccactggcgcgagaatgtgtcttgacacattctattacagaaaaaaattataatactgctgataatgaggccgtcgccactagtcttttcaggctgaggtgacagcctcctttcacaaattcgaaaaagagaggcttaaatcatgtttaaagtaacttttcgttttgaaaacggtgagaccgtagagggttttgcggcagccgaagagaatcttctggaagttgcaagaaaaacgaatgtagcaattgatgccccttgttccggtaacggttcctgcggaaaatgtcgtgtgaaactgttaaaaggaactctgaattcgccaagaaccagacatattacagaggaagaatatgcagagggatggagattgtcctgtgcgagtaaagtggaagatgatatcgaggtggaagtaccggatatcgcgtctgcctatcgcagcagaatgaaggttgcggatttaagttccccggaagaagtagctatttttgacaatgccaaagcagatgttgaggcggcgggaatcgttctgaaaaacgatatggaagtggtagatgttaccatggatactccgtctctggaagatactatgccggataatgagcggctgatgcgtgcactgaaaaaacagatgcaggcagaacatgtgattcttccatatactgtaatctgcaagatggcagatgtgctgcgggaaactaatttttctgttcgctgtgtgatcggaagaacaggaagccaaggcaatgttttcgtctatgatatttttccgaaagatgctgaagtagtgatcggcggacttgctattgatatcggtactacaacagtatccgcattgctgatcgatatgataagtggtgatatccttggaaaagcatcctcaggaaatggtcagatccgttatggagcagatgttatcaaccgaatcatcgaatctgcaaaacctggcggaagacgccgcctgcagaaagcgattattgatgaaacaatcaatccgctgattcagcagatgtgtcgtgcggcaaaatttccgaataaacagatctaccgtatgtgtgttgccggaaatacaactatgaatcatttgtttgccggagtgaatgcagatccggttcgtatggaaccgtatataccgacattctataagacaaattcgctgtatgcatctgaccttggtctgacagtgaatccggatgcacacataattatagctccgaatatcggaagttatgtgggtggagatatcactgcaggtacactagtcagcatgctgtggaataaaccggaattttccctgtttatcgaccttggaactaatggtgaactggtatttggtaactctgatttcatgatgagttgtgcatgttcggctggtcctgccttcgagggtggagatatcagctgtggtatgcgtgcaacagatggcgcaatcgaggcatgtactatcgataaagaaactatggaaccgtcctttacggtcgtaggagatccgggacaaaaaccgattggtctgtgtggctcaggaatcattgatgtgatcagtgaactgttctctgcaggaattatcaatccgaaaggaaaattcgtgcgggaaggcgagcgtatccaccgggataaatacggtatgggaagctatgttctggcattccagaaggacgcaggtgcagagaaagatgttgagattacagaagtggatattgacaactttatccgtgccaaaggtgcaattttttcagccatccgtacgatgctgaattctctggaattcgatgtgtcgatgattgaagaagtgtatgtagccggtggtatcggaagcggcatcaatatgaagaatgcggtcaatattggaatgttcccggatattcctctggaaaaattccattatattggtaactcttctctgtccggtgcctataccatgcttctttccaaagaggcagaacgcaaaacctaccaggttgcatccaatatgacgtatctggaactgagtactgtaccgacttatatggatgaatttgttgcggcatgctttattccgcatacggataccagtatgttcccgtccgtttctcagcagtaaagacagacatgcaggagagaacaaagatggaattacagtatgaaaaagacagtaaggaaagaattccttatgagcactatatggaactgtttcagaaagcagatccggcagaaatcagtgcaagaacagggattccttacgacaaacaatcacagacctttaatcttcatctgttgggtgttgcttatcaggtacattttccggattatgtggtaacacacgatccggaaagcacggtaggatattatcctctggaagcagcaatcaatgcccggattctggtacttcgttacctggtggaaggacacagcgctccgtctaccggaaaatatttgacgtatcgggaaacaccgtggggaactgtatatctgaaacagtttcagggcagatgtctgatgcgtcttgcttatggatttggcaacaaacaggaggcgttccggtctgcaatggaaaagattggtgcgacacctctcgagcacggcgatatcgcttatgaattcgaagtggttgatgggttccgtgtacagatgatcttatgggcaggtgatgacgaatttccaccgtcatcccagattttattctctgacaattttcccattgcttttcaggcagaggatatggctgtagtgggcgatatatcaatcactatgataaaagcactggcataataaaatcagaattttacggatgtattatttgtagaaaaagtaacgattcaggagatatggaaccgttacgggaaagatagaaaatagggaatgactttcattcccgacagtaggagaatgtaaatgaataaggatagtagagtaaacattgcgcgtaaagtgcttcaggatgggaagttgcctgttgacgaaggaaaccgcgaaatatttccacgatgtaatgttgcgtccgctactgcattaaagatagattcagtcactgtgttatctgcctttggtgtagtatactgctatacctgagaaaggaaaacatatgaaaaaactgaatgttaaaactatcgtttttgcagctgttttagtggcaatgaatctggtgttgagccgggtgctggcaattaatattggctccacccttcgaattacagtaagtgcaacaccgatttatctggcaagtctctggtttggaccgctggtagggggaatctgcggtggtctgggagatctgctgggatgtctgatccagggatatgcaccgaatccattgattctggtgtcttctgtgctggcaggtgtgattcctgcagtatttaagaaatatgtcttcagggataaagtgaatacctggaaaatagcagttatgctgattgttcatggaatcgtaggctctctgggatttactgtcgtaggattgcatgtatactatgcgaccccatggagtgtgctgtatgctacaagagtcatacagacgattgcactgacaattgcaaatacaattctggtttctgttttatatcagagtgcactgactacttatgtgaatcaagtatttgctctgcagagaaccagagaagtataaaagataactgtaaaataagaaaacagttatcataaaaggaggtaaatgatatgggatacaaaacagacattgagatcgcacaggaatgcgaaatgaaaccgatcaccgagatcgcagcaaaagcaggtattgatgacaaatatctggaacagtacggaaagtacaaagcaaagatcgactacaatctgctgaaagaatctgacaaaaaagacggtaaactgatcctggttaccgctatcaacccgacaccggccggtgaaggaaagaccacaacaactgtaggtctggcagacggtatgcagagaatgggtaagaatgttatggttgctttaagagagccatccttaggaccggttttcggtgtaaaaggtggagcagccggcggcggatatgcacaggtagttccgatggaagatatcaacctgcactttaccggtgacttccatgccatcggtgcagccaacaacctgctggcagctatgatcgataaccatatcttccagggcaatgctctgaacatcgacccgagaaagatcacatggaaacgttgtgttgacatgaatgaccgtcagctgcgtaatgtagtagacggacttggcggaaaaaccaacggtatgccgagagaagacggctacgatatcacagtagcatctgagatcatggcagttctgtgtctggcaagcgatatcaacgacctgaaggaacgtctgggacgtatcatcattggatatacatacggtaaagtggcagaacagaagccggtaaccgcacacgatctgcatgcagaaggcgctatgaccgctctgttgaaagatgccctgaaaccaaacctggtgcagacactggaaggtgtaccggccatcgtacacggcggaccatttgccaacatcgcacacggatgtaactccgtaacagcaaccaagatggctctgaaactggctgactatgcgatcacagaagcaggcttcggtgccgacctgggtgctgagaagttcctggatatcaagtgccgtatggcaggactgaaaccggatgcagtagttatcgtagcaactgtacgtgccctgaaatacaacggcggtgttccgaaagccgagctgaatgcagaaaacctggaagctctggaaaaaggtatggcaaacctgttaaaacatgtaagcaacatcaagaatgtatacaaactgccatgcgtagttgccatcaatgcattcccgaccgataccaaagcagaactggatctggttgaagaaaaatgtaaagagctgggcgttaacgttgctctgtctgaagtatgggcaaaaggtggcgaaggcggtctgaaactggctgaagaagtgatccgtctggtagaggaaccaaacgacttcacatacgcttacgaactggaaggttctatcgaagacaaactgaaccagatcgtacagaaagtatacggtggaaaacgtgtcgttctgacagcaaatgctcagaaacaggcaaaacagttagaggctcttggcttcggcaactgcccgatctgtgtggctaagacacagtacagcctgaccgatgaccagaccaaactgggtgcaccgacagactttgaagtaaccgtaagaaacctgaaagtttccgcaggtgcaggctttatcgtagccctgaccggtgagatcatgaccatgcctggactgccgaaagtaccggctgctgagaagatcgatgtagatgagacaggaaaaatcacaggtctgttctaataaataatccatatggctgcccggaaaccgggcagctgtatcagaaataagcggaggaaagaagcaatgggattttcaactgtaccatgcaatgaatttgtagaagtattggcttccaaagcaccggttccgggtggcggcggcgcatctgctctggttggagcaatcggaaccgctctgggcaacatggtaggaagccttaccgtaggtaagaaaaaatatgcggatgtagaagaggagatgtgggagctgaagaaaaaagctgatgaacttcagaaagaactgctgcatctgatcgaacgtgatgcggaagttttcgaaccactctccaaagcatacggaatgccgagagagaccgaagaggaaaaagcagagaaagccagagttatggaaatcgtcctgaaagatgcctgctctgtaccgatggaaatcatggaaaaatgctgtgaagcgatcgagatcatcgtggaatttgcagcaaaaggctccacactggcaatcagcgatgccggtgtaggcgcagcattctgcaaagcagctttacagggtgccagcctgaacgtatacatcaataccaaatccatgaaaaacagagaatatgcggaagaactgaatgaaaaatgtgacgcaatgttggaaaaatatacaaaaattgcagatgaagtattcaacagcgtattaggaagactgaaataaggaggaacataaaaatggcaaaacagttattaggaaaagaagtaactgcagctctgaatgaaaaaatcaaagcaaacgttgcagctttaaaagaaaaaggcatcaacccgacactgggtattatccgtgtaggtgaaaacggaagtgatatctcttacgaaagaggagcaaccaaacgttgcgagactctgggtgtagagtgtgtaaaattcctgcttccggaagatgtatcccaggaagaacttctggctaccatcgataaagtaaacaaagatgacaacattcacggcgtactgttattccgtccgctgccaaaacatctggatcagtctgtaattgaaaacgctctggatcctgcaaaagatgtggactgtatgacagacggatctatgtccggtgtatttacaggaaaacaggttggtttccctccgtgtacaccacaggcatgtatggagatccttgatcactatggaattgactgtacaggtaaaaaagcagttgtcatcggacgaagcctggtagtaggaaaaccggcagccatgatgctgatcaagaaaaatgcaacagttactgtatgtcatacaagaactgttgatatgccatctgttgcaagagaagcagacatcattatcgttgcggctggccgtgcaggtgttgtaggcgctgaatatgtaaaaccaggccagacaatcatcgatgtaggtatcaatgtaaatgcagaaggaaaactctgtggagacgttgattatgcagcagtagagccaatcgtagatgctatcactccggtaccgggcggtgtaggaagcgtaactacatctgttctggtaggacatgtagtagaagcagcaatgagaaaatatatgtaagcgcagaattatatttctgaatttaaaattttcattagttaaaacagtgggaatcccacagataagagccaggagaacagtttcttatctgtgggattttctctttgttaacccttgaaaaaatccatatttctgttaaaatatctgtagtgtgatttcaggtgtgcatttattgtctgatcagatagaaatctgctttcagatattatgaaaactgtagcaaatggtacagggagcgttaccggaaaaatcacatgtaatgtgattaaacagtcgtacaaaagtagtctgtacaacaagaggaggaaaacatgagtaaaaaacctaccgttttaatgattttagatggctatggattaaatgacaaatgcgaagcaaacgcagtttgtgaaggaaagacaccggttatggatcagctgatgtctcagtgtccgtttgtaaagggtaacgcaagcggcatggcagtaggtcttccggaaggacagatgggtaactcagaagttggacatctgaacatgggcgctggtcgtatcgtatatcaggaattgacaagaatcaccaaagagatccaggatggcgatttctttaaaaatgaagcactgctggcagctgtaaagaatgcaaaagagaacaactctgcgttgcattttatgggactgttatcagacggtggtgtacacagccacatcactcatctttttggtctgctggaactggcaaaaagagaaggtctggaaaaagtatatgtacactgcttcctggatggtcgtgacactccgccggcatccggtaaaggatatatcgaagaactgcaggctaagatgaaagaaataggcgttggcgagatcgcaaccgtttcaggacgttactatgcaatggatcgagataaccgttgggatcgtgtagaactggcattcaaagcaatgacaaagggtgaaggcgtaaaaggaacagatgctgcagaagctgtacaggcttcctacgatgcagaaaagacagatgagttcgttctgccgaccgttatcgaaaaagagggcaaaccggttgcaaccgtgcaggataaagattccgttgtattcttcaacttccgtccggatcgtgcccgtgagatcacaagagcattctgcgatgatgatttcaaaggtttctcacgtgagaaaaaactggatgtaacttttgtatgcttcactgattatgatgaaactatcggaaacaaactggtagcctttgtaaaacaggagatcaaaaacacatttggcgaatacctggcagctcataacatgacacaggcacgtatcgctgagacagaaaaatatgcacacgttacatttttcttcaatggtggtgtggaagagccaaacaaaggggaagacagaatcctggttaaatctccaaaggtagcaacttacgatctgaaaccggagatgagtgcatacgaagtatgtgacaaactggtagatgcgatcaaatctgacaaatatgatgtgatcatcatcaacttcgcaaatccggatatggttggacataccggtgtggaagctgctgcaatcaaggcggtagaggttgtcgacgagtgtgtaggacgtgcagttgatgctctgaaagaagttgacggacagatgtttatctgtgctgaccacggaaactgtgagcagctggtagattatgagacaggagaaccatttactgctcataccaccaacccggttccgttcatcctggtcaatgcagatccttcttacacactgcgtgagaacggctgcctggcagacatcatcccaaccctgatcgaactgatgggtatggaacagcctgctgaaatgacaggaaaatctctgctgatcaaaaagtaagattcgaggaagtttgatttttcaaacatgaataactatgagaaacacgctctgcgagtttcttatagttatcgcggcagtcgccaaggtctcgtgcaagcacggactttggctcgttgctcgcgtaaatacaaatgcaggaaataaagacacaatgtactttatttcctgcatttttttcgtttgcttatccgatccggaatagaaagtggcagaattggctgaaatggaagtatacaaaaaagaatgtgtctgatatggagcaaaacacattccaaacatgaaaaatatgatcactaatgcgatatttcttttcaacttatgtaaggtatttacagaaccacccctgccagaaataaatttccaataattaatatggaaaagtataacataagtgttatgaaatgataatagaatatattttttacataaataagaaatgaaacacacatattttgctctcgcttcggacatactgaaaaagaacagcagataacagaaacaggaggaatatgtgatgtatcgatatctaccgattcgtagaatctacgcaagagaagtgctcgattccagatccaatcctacggtggaagtggaagtgacggtaggagaaggaatcatgggagtggatggatatacaggaagagccattgtgccgtcgggagcatctaccggcaaatacgaggctgtggaactgcgggacggagaagaacgcttcggtggtcttggtgtggaacaggcggtacgaaatgtcaatgtccgtctggcagaacagatcgtaggagaaaatgcgctgaatcagtcctatattgaccaactactgatccaggaagacggaaccgacaataaaagcagcctgggagcaaatgcgacacttggcgtgtctcttgcagtagcccgtgctgcggcgaaagcgctgcgtctgccattgtatcagtatctcgggggcgtgcatgcggtgcgaatgccggttccgatgatgaacattctgaacggagggcgccacgcggacaatacagtagatcttcaggagtttatgatcatgccggtgggagcggaaagctttcgggaggcagtacgcatgggagcggagatctatcagcgcttgaagatccttttaaaacacaaggggctgtctaccgcggtcggtgatgagggcggtttcgcgccggatctggaaagcgcggaacaggtgctggaatttctgacagaagcgattgaagacgcaggatacacaccgggaagcgatgtggtgtttgccattgatgcggcggcaagtgaactgtatgatgaggaccgggaagggtactattttccaggggagagccggatgcagggaaatgaggttgtgcggacatccacagagatgattgcatattatgaaaacttgctggatcgcttcccgattgtttcgattgaagatggtctggaagaagaggactgggaaggctggacggagatgacacggaggcttggaaaccgggtacagctggtgggcgatgacctttttgtgacgaataaaaagcggctgaactgtggaatacgtctggatgctgccaatgcaattcttgtaaaagtaaatcagatcggaaccctgacggaagctctcgaggcggtagagatggcataccgtttcggatatcgcacgattatttctcatcgttccggtgagacagaagattcttttatcgcagatctggcggtagcctgtggcagtggacagatcaagaccggtgcgccgtgcaggtcagaccggaatgcaaaatataatcagctgttgcgtattgaggattatcttggcaaaacagctgtgtatgagaatccttttgctcgtccgacaggtaaggagatcggataaatggaaaataacgaaaccacaactaaatgacattaaggataaaatagtagattgtgaaaagctgattttgatgttaagatgaaattgggaacatgttacgaaagatacaaggatttcttaaaagatcttaccatcatgagcgatgtgtttatgcggaatgtatacaagaggatacagaattaagcagactgatgcatgatcttcactgtaagaatgcagaagatatgcacagtaagatacttgccgacagagtatacgaattgaaggaaacatggtacagaaatggattgacgggattgacgagagcatgagtgtagcacattaacaaatgataaagtttaatggagctaccaggggatactaattcttctggtggctttttgtgtgttgcatgtatataaaaaatgctgatttataaaaagagataatataagcaaaaagaaaagtcttgacaaataaacgaccgggccagttattctaacctttacttgaaaaggataaatggatcctgtgtccgatatgtggtgcaaaaatgaggacacagatattggatgatacggaattaaaacattttccgctgttttgtccaaaatgtaaagaaaattttatcatcaatgtaaaggatcatatagtggattatcaatctattgccagacgctaagacgcagagcagcaattttattgccagcgtcttttgtgattatattaggaaagagagggacaacaggtagtgagtaatattgttgttttatcaggaagcgtacgaaaaggtggaaatactgagttacttgtgcaggcatttgttgatggtgctaataaaaataatagtgttgaagtaatttcggtagcagattataaagtgaatccttgcatagggtgcaatacatgttttgacagagaaggacatgagtgctttcaaaaagatgatatgacgaaagtatatgaaaaactgaaaatggcagatgtgcttgttatagcgtctcctgtatatttctatggtgtcagtgcacaattaaaagtacttattgatagattacatacacctatggattctattaaaaaaggtaaatccaacgtatactgcgtcatttaaggaaagatgaaacaaaaggagaaaatatggaatcagatatcattaaaatcagccacctgaataaaagctttggcaaagtaaaagctgtaaatgatttgagctttcgtgtgaaaaaaggagaattgtttgcatttcttggagtaaacggtgcatagatatatagacaaaaattgctaaacagctaatgtagatttagatagtgagggtagtgtataaacacgtccctcttttttagatgtgttttgattgtttgagataaagtctaacaatcttttatgctggtctgcaaaattaaacttaattgtaatttcgttgttttcgtggatatagattgtatcaatcaattcagctaatattccacggtttaactcggttatgttcttatgtttcaagaacatttgtaggtaagggtcattattgcctacgccttttgaggaaagctcaatctcggctttaagattgacaatcgcatttttcatgctgtctgcctttgcttcaaatttggctttcattcttacatattcagctctggtaatctcgccacacttccagtccatatacaaattgtctatgacattagtaatcttttcaagctcatgttctttggtttgtaattgctttgtcaatcgcaaggactggttacatacagcttcttgcttattgatttctgtgattacctctgccatgttacaaacaagagaaatttgtacttgaattgcattgagtacggcttctgtcaaatcttctaatgaaatgctatgacggctacacttatctttattttttaaagcataagtagaacacacataataagtatattctttggtttctccgtttgccatgttctttttgttggttttctttgtcatgctcttatcacaatctgcacaacgtaggaaaccagaaaacagatagacatttctttttgtaggagcagtacgggtatcacgttgagataaagactgtgccatttcaaaggttactttgtcaataataggttcgtgagtattctctacgataaaccattcactctctggcgttgctatcgctttatgaaccttatagctgattactcgctgtttcccttgtaccatatctccgatatacattcgattacttaaaattctagctatcgttgaaatgccccacataccgtcattctttgcttgattaggtgttttgaggttcaagccttgactgtgtttgtagtccataggtgtaggtacgcctaattcgttcaagtgtcttacaataccgattttactcataccgtcctctacataccagcggtaaatatcccgtaccacttgtgcagggacttcatcaatgataaggcaatttttatttgttgggtctttcttatatccataaggagcgaaagccccgataaactcgccattacgacgtttcatattaaaggtacgtcgaacatcattagaagttcttgctgaataacggtcattcatcaatcccgtaatcggaacgtccataccgtctgtaatcgactctggatttttgtaagtgtcaaatgacggacttcccagacagataaatcttgtgttataaagtggaaaaagttcttccaaataataaccttgatctgcataatttctgaatgttcgtgctaatgtcttgcaaataatacaattcacaagaccagctttcacatcatcaatcatgcggataaattcagttcttgcgtcatcagttgtaccgctgataccgtcgtcgatataaatatccacaaggatatattcttcttcaaagaaattttccaagtattcacggataatctttttctggttcgtaacacttaaactttcgtcgttgccgtcgtcctttgataatcggatatatacggcaattctccataccatgtgatttttgctatttgattttttaacttttctaactctcggcatattgatttctcctattagaaaagtcatttatcactcttttattataccatatttcgcccattttttcagtaactttttaggctcttgaagtaatttatcaagcaaaaatcaagcgttggagcatcctcgttaaacacgacttttacaagtgttttaccacataagaagcagtagggattgtttaattcctctatgcaggcagatagacgttctgtgttggaaagagccttgtcggtattgattgacttgaccgcttccaaataatcggaacatactgttgtctgcttatttcctaaatcattcaatagatataccccctttgctttgctgtttagcagtttttacttatatataagcaggcagacggctttggaaagctccgttagtatctcaactattcccattcttgtgggcagaaccgcaccatgcggacgtatcattattctgtgaggataggtcgtggcaaaacgacttttccaacagtcgctctcggatcactgcgtgggtcgctcgctttcttttgaaaaggtcgtggcgtacagtccccgtggctcactatgtcgtactgcgtgacataatgctgagagaatgcacaatgcggttaaacggtttgaaggtggtatatcaattttgtatgcaggaacatattgaggatttaagatatattacacaggtacaggccgataaacttgaaaaatatgcagatacggcatatgcaaaagagcttgcagaaagagaactccgagaatgtcagaaatatcttttctgccatgccaagaatattttatgggattcaacagtctggtatttggaaagactgcatctggaacaatatagagtcaacccatccaatcctgtgaaaaaattttcctttatgggcatagaaaaaagagagaaccgggaaattttgcaggaatacatgaaatactgtctgggtgttacacatttggcaatgagtggcatacaagccgaattctacaggattctggcatttgccatgtggatggaaaaagaaaccgcgatggagctgaaacttgcatcagaaaccgaaataaaaaaatatttccagacaattgagttaaaagaagcttcttattttaatgatattgttatagcaatctatcagctatatgaatatctgcagacgaaagaaatcatagacaggataccatttcgttatgagtattatttgaaaaaagaaatacattgtcataataaccgaagcgtagagatggaaatatatgagaggattctgagagaattaaaaaatttccctgaaattccaagattgatccttttacattctatgctgattggactaaggatcagtgaagtatgcaccctgaaaggggatgcttattcctggcagggaagagatgcgtggatacaggtttatcagatgaaaatgcgaacatacaaaagagtaccgattccagatgttctttataagattatgaaaagatatttggaaaaatatcatattggaagtgaggattatgtttttcaaaacaaacggggaggggcatatcagtatggttcgtttaagtggcaaatgaaagaactgtttaataagaggcaggatattttcaaagggtatgattttaaatcacatgatttccgccatacgatagcgactctgttatatgatgacgaagtccctcttcagagtatccgggactatctgggacatgattatgaagagatgacacagcagtatgtggattttatgccaaagaaaatttcagcagcgaatcaggagtttttcaagaaaggagaaaacagcctggcatcaggaatcaagaagtgcaaacgtggaaaataaattttacataaaaaaattggactcttatgagaaagcaagtgaaatttcaaaaatacgaatgggaacagaaccttcgtatgaccttgatttactgccgtctgtacagatgcagaaagaaatgagggagttcctgaaatacagaggacaacagcttggggcggaaaaattttatactgagagaagattttaccatcatttatgtaaaatgctgcaaaccagaagagacagaccggaaagttttttggactgggacaaagaaaaatggaagcagcagatgaaaatatggcttttacagcagagattgcccctgacagaaattgcaaaatcccattgtgggaatgaaacggtatcacaggcaaagacattgcactatattgaccgattaatagattatttccttgatttaagagatgctgatgtagatgagatgacaaaggatgtctggcaacttgaaaaacttgatatacaagtgaaacaggatttgacgcgcacgaccagaattataaattttaaggaaatctcccagcaggatctcagagaggaagtaaaaaaggcaatttattttcaactgaaaacagaaagcatcggtactgtaaaaaaagaaatgactgccattcgaaggttttcaagatatctgaaggaaaacaataaagaagtagattcctgctcaaagctggacaggaaaatcatggaagagtatttgatatacatgaaaacagaagataccgggacaaaaagatatcgggcggagctgacgagactgcgggcattgctgaatatggtagctgacgtctatcaatatccgcaggtaaaggatttaattttgaatcgggatattccaccagatataaggggagaaatcaaaatttattccgatcaggaattaaagcgatttaatgctttccttacgaaagtggatgtgcagacggcgagacttatgcttattcatcaaatgcttggaacaagaatgtcagatacactgacactcaggacagactgcctgattgaaaaagacggtgaaaccataatacagattcaccaaatgaaaacacatttttatgaaaaaccgattagtcaggaactggctgtcttaataaaggaagcgattcgatacagagaaaaggagcacggaaaaggtaaatacatttttacaagtttaagtgatccttcaaaaccaatgaaatatgctacagtccagcaaaaaattacagataaaatatatcaggaaaatctccgagatgataagggagaatattttggattcggttctcacatgtatcggcatatttatggcatgaagcttgccgagatgcatgtggatgactggacaatcgcaagactactggggcatagaagcctgagaaatgtaaagtattacagaaagatgagcaacaaaatactggcagatgatacacgaaaaacaagaaaccgattatctaagatggtactggaatgtctggaaggatgggaggaagaatatgaacaaatacgattcgatgatagcctgcaataaaaaagccagtgaagaaaaagtaaacagggcagtgacagaaatcaggcagatgctgacagaacgggaaaaagtgacggtcccaaaactgacaaagaggacaggattgtccagaggattcttttataagaatgaaacggtcagaaaagaaatggatcgtgctctggagcagcaggcaggaatgatagaccccaaaagatacataggtgacattgtactgaagaatcggatcaatgtattagaagaacagatccgggagctgaaacgtgaaaaagagcaaatggaaaaagaaaatgtaagattgagaaaagccttaaacaagaaagacctgaacgtattaaaaactttataatctgaattagaaaataatctgcaacgaccgggaagaatttcccggttgttgtggttggaatataaaagtgtagataacaaaaggtgtgcataaattgtatttatgatatacttatcgataagttaaattcgaagaaagaggatgatagaagatggaaaatccgtttgaatttcatgaagaagatacaattattgcatgcgtaggtgacaatgggggaactaccgatgaggatataagaaatgggttcaagcgtaccgttgaacttctgacggaatcattgaaaacaggttccgaagttgaagatctgttagtatatcctatcgtttataacgccagacacagcattgagctatctttgaagattgtcataaaaatgttatggcgaatagaggaaaagaaagggatatgttattctgaggaagtcttaaaggaaagaaaaaaagaattacacacgcatagtattgaatgcctatataaattagcatgtgataagaagaatattgacagaagaattcctgcatattttgagaatatagaagatatgatttacttttattatttcgatgaagagggggatgccttcaaatatgaactaaataaagaagatgaaccacatatgataaaaaacaaaatttctcatgtaagtattgaattgttagaaacagaatttaaggaagtaatgaaaaaatttgatgatttgatatattttctggataattgtatctttgaatattcgctaggaacatttaccaagagcttgtcgagagcagatatatgggatatttcgaagcggcttcctgtatatgaagaatggagaacagagaaattcaaagaagtcaaagatgagattaagcaagaatatcatctcggaagtaaagaattttcagatgctgtaaatctaattaaggaaaatagagagttttcggtaaatattggatgcgagaaagtattcgggtcaattacagaaaatgaattaaaagaatacgcttcattggttagatactattctgagaaaagtaaatctgacaacaagggtaaagagatagggttcgatttacgcaaaatacaaaagaatggggagattttgaaaaaatatttatccagcatttctatgaatacattaaatacactattatgttttagtgagatgagtaatagtttcttagcggttgaacatttggaagaggttcatgatgacatagtctctaaggcgtttgacggaacatatctcataagaaaactaaaacaaagaaatatatgtttaagaatcttatatggaatgaaaaagtgtggacaggtgacttatgcaaaacagttgagtgctgcactggaacaagaaggagtagagctaacgctttgagaataatagtgaacacgatacactcgtgtctctgacgttaaagccagtgttttagagggctgggagagggatgcccaattttattgacgagcctaccacaggacttgatccacagacaagacagttaatctggaatgttatcgagaagcttcagaaaacagaagatatgacagtatttctaaccacccattatatggaggaggctgctaatgccgggtatgttgtgattcttgacaaaggaagtattgcagcggaaggtacgccgtttgaactgaaaaatgattatgtacaggatatagtgtctgtttacggtatttccgaagatgaaataaagtcattgaacagagaatataaaaaaatacgtgacggatatcagataaaagtaaaaaatacgaaagaagctacggagcttattgtagagcatcaggacctattcacggattatgaagtagtaaaaggcggaatggatgatgtatttcttgcagtcacagggaaaaagctgggaggtgagcattgatgagaacagtgttggcattaatgaacaggaacaggaaactgttttttaaagataaagggatgttgtttacatcaatgatcacacccgtcattctgattgttctgtatgctacgtttcttgcaaaggttttcagagattcttttacagcagcaattccgaatatgattacgatttcggataagcttattaatggaaccgtggcagcacagctgacagcatcacttatggcggtgagctgtatcactgtaacattttgtgtgaatctgactatggtgcaggacagggcaaatggaacatggaaggattttaatgtttcgcctgtcagcaagggaaaaatatatttgggatattttctgtcaacagtagctaattcattgatggtcaatgcacttgcgtttgtattatgcctgggatatttatttgaaatgggatggtatatgaatgcagtagatgtattatgggttttatttgatatgatattgctcgtcctgtttggaagtacgctttcaagtatcattagctttccgttgacaacacagggacagctttcggctgtaggtacaattgtcagcgcaggatatggttttatatgtggtgcttatatgccgatttcaaattttggttcaggtcttcagaaggcactgtcttatcttcctagtacatatgccacttcgttgatcaagaatcatatgcttcacggagttttcagggagatggagagaaaacattatccggatgaaatggttgaagcgataaaagacactcttgattgcaatccggtatttcatggaaatgtggtaagtgtaaatcagatgatcggtattatgatgggaagtatagctgtattcggaattatttattattttgttacattgctgccagatggtgaaggcggacgataggaaatattatttttagtggatgaaagtcaagtgttttagctgatgacacgattggtatcgctcatgtgactacacgattcttactatttttcgtaatatatgttaccttccaatcagccaacaggcaaaaaataaaaggaaggtaaaacaaaatgaagaaaaacggaaagaagttattaattttaggaactgcgttacttgtaatgtttgcaatctggaaatgtttaatacaatgtgtggatgtgcagtcggcagggcagaagggcacagagattggattcgcaacctttaactgttggtttcacagagttaccggagtacacatggcaatctatacaattaccgactggttaggtcttgtgccgatatttgtaagtatgaaagtattatggattgcagtagcacttatgacattgattctggttgaggttgggataacagacgtagtaaccggaagaactgcaattagtaagaatttaattatcgtgcaatgatgggagaatatattatatattatcgagacaggattgtcggaggcatatatgatgacaggttacttgtgaaaccgacaaaatctgcagtttcttatatgacaactgcgacttatgaattaccatatgaaggggcaaaagagatgttattagtagaaaatgttgacaggagagaatacctggctggacttttcaatgcaatgtatgatgaattgccggttcataaagcaaacaataaaaagaaatctttgaataatctgtacacatttcagtaaaaaaggttgaaattcacaaatctctatggtaaaataaatgaggttgaccataggaggtgtaattgtgaatattttacggattgtattgacggttatttttgtaatcgattgtataggtttgacagtagttgtcctgatgcaggaaggaaaacagaaaggtctgggtgctatttccggtatggcggatacttactggggacagaataaaggtcgttccatggaaggtcatttggttttggccacaaagatcatggcgattctgtttatggtactggcaatcgtattgaatatgaaattttaagtgacgtgaaaagaacactcttgcaactttcttgcaagggtgttttttgcacacagagagaagtgatcagcaatgattacatttacaatgggagaccgtttgtaactgcaaagacagtgaacagttacaaatgttgaatgaatatggaaaacagagacatatgcttctgattttccagggagaaagatatgagaataaataataaaaaattaaaaaacagaaaaaaattgttgctggactttgtatccaataaagaataccagccgatgcgtgcaaaagatattgcaatgttgctgcagattcccaaaggaaaacgatccgaacttttccaggttctggatgaactggaggcggaaggaaaaatcatctgtaaaaaaggaaagtatgaaaaagtccggaagattgctacagtgaagacaggttcaccggaactgtcagaaggaacgtttattgctcatccgaaaggatttggttttgtggaactggaagatcaggaagaagatctgtatattccccaggaagatactatgggcgcttttcataaggatcgggtacaggtgaaagtgaaagaagaacgaaccggtcagcgccgggaaggaacgattgtacagattcttggacatggaatcacggaagtagttggtacatttgagaaaagtaaaaactatggatttgtgattccggataatcagaagattcagcaggacatctttattccgagggaacatacgcttggggcaaatgatggcgacaaagttgtggcaaagattacttcttacggtgggaaaaacaaaaatccggagggaagagtacaggaagttctgggagctcagggagccccgggcatagatgtgctttccattgcgagagcatatgaactgccaatggattttccggtaaaagtagccaatcaggcggatcgagtaccggatcatgtgattgaaggagattttcagggacggatggatctgaggaactggactgttgttacgattgatggtgaagatgcgaaagatctggatgatggaatctctctgacaaaggatggaaatatttatcatctcggtgtgcatattgcggatgtaagcaattatgtacagggaggaagtgctcttgatcgtgaggcacttcgacggggaaccagcgtatatctggtagaccgggtgattccgatgcttcccagacgattgtctaatggaatctgttccctgaatcagggagaagaccgactggccctcagctgtctgatggatattgatgcacagggaaatgtgatcagccataaaattgcggagaccgtgatctgtgtcgatcgccggatgacttatacggcagtgaagaagattctggagggcgatggggatctccggagagaatatcaggattttgtgccgctgtttcatcatatgaaagagctgtctgcgatccttcgcaaaaagagaagtaaccgtggctctattgattttgattttccggagagtaaagtcttcctggatgagatgggaaggccggtggagatcaaagcgtatgagcagaatgtagctacaaagatcattgaggattttatgcttcttgccaatgaaacagtggcaaaagaatactgtgagcgtgagattccattcttatatcgtacccatgagaatccggacagtgacaagatggaaaaggtactgacttttatccgcaatcaggatattccggtacacaagtcacatgaagaaatcacaccgctggaagtccaggagattctgaatgagatcgagggagaacctacggagcctttgatcagccgactgctccttcgttccatgaaacaggcaagatatacgactgggtgcagcggacatttcggactggcagctaagcattattgtcatttcacttcaccgatccgaagatatcctgatctgcagatccaccggatcatcaaagagacgatccgtggccggatgaatcaggagaaaaaaatgtattatgcgcagattctcggggatgtggcagataagaccagtatgttggaacgcagagccgaagaggtagaacgtgagaccgtgaaactgaaaaaagcggaatatatggaaaccagactgggacagaattatgagggtattatctccggtgtaaccggctgggggttgtatgtggaactgccgaatacggtggaaggtctggtgcatatcagcacattgatggacgattactatcagtttgatgaggaagcttactgtctggtaggtgaaaagaccggacacacatatcgtcttggtcagaaagtaacggtaaaagtatcacaggtggatctgtccacgaagagtattgactttatcttaaaagaagaaaacagctgttttaacaaatacatggattgggaggattaaagaatggcaaaggaaaagggaagccgtctgatcgcgaacaataaaaaggcgtatcatgattattttatcgaagagacatacgaggccggtattgcactccatggaacagaggtaaaatcgctgcgcatgggaaagtgcagtatcaaggaatcttttgtgagaattgagaatgaagaagtgtatatctatggaatgcatatcagtccttacgaaaaaggaaatattttcaaccgggatccgttacgtgtaaaaaaactgctgcttcataaaagcgagatccgtaaaatgaaaggaaagattgcagaaaaaggttatacgcttgtaccgttaaaagtgtattttaaccggagcctggtaaaagtggagattggccttgcaaaaggaaaaaaactgtatgataagagacaggatattgccaagaaagaccagagacgggaagcagagagagatttcaaggttcggaatctgtattagagcgtgtctgaaaaagtcttttcgtgagctgtgagtcccacaaagtggggcttgtagattgcggaaatgatttttcagacacgcttccaggagaacaggagtgaacagtaacattagtagttcactcagggaaaaatcaatggatctggtcttgacaatactctgtatgtcacatataatagaacaagtacaaatcaaaatcagttcacgggatcaattttgatttgcaatgaacaaaactgtctgcgaaccatacaacttatatactcatataatatgtgagggcttgtactggtttcgacgggggttttgaagtttgggaagccattcgcagctctgggactgcgtcaccaacctggaaattaaatttaaacgcagacgaaaatttagcgtacgctgcctaatggcagctgtcggtttctgagtctcccgcagcttagatcccggcatcaaacttagcggggcactttttcttcaaagctttgagaagaaaaaagaatttatgaagctactgaggtctgaagcctgtcatccggcgtcgggttaagggaatgtcaaaagaatgactgtaatgggagatgcctgaatggataggctttcggacaggggttcgattcccctcaggtccatatttgaaaaaccctggaaatccttgatttccggggttttttgctatctggtggagagaaaaaatgccgttttgaaccgtttcaaaccggttcagagtggaaaaattggggtcaaaattggggtcaaaatcgaagcggaaatcatttgaaaaatctatggttttagagtgttttggagtgcttcaaattaaaaaaatgataatataaggttgaagtattcgacgtattttctgaataaaagtatatgaggaaggaaaacattctttctattgctggcatgaaaaaatatcaaaaaaagaggcactgaaaaaggcagaggacatgctccggaaaacgggcgttccgcgtgtggagcatatgatgaaggagtatccgttccagctttccggcggccagagacagagggtcatgattgccatggcacttgtatgtaagccggaaatcctgatcgcggatgagccgacgaccgcactggatgtaacgattcaggcacagatactggatctgatgaaccagctgaaaaaagagacgggtacatcgatcctgtttattacacatgatcttggcgttgttgcagaggtctgcgatgatgttgccgttatgtactgtggccgcgtggtagagcggggagatgtaaaaacaattttcgccaatctgtcccacccgtatacgaagggactgctgggatcgattccgagactgggagatgccggaaaagaactgaagtcgattccgggaaatgttccgaacccgaaatatatgccgaaaggctgcaaatttgcgccgcgatgtccatacgcttcggaaaaatgccgcgaggcagaaccgggatttttccagatcgaggaaggccatatcagcagatgctggctctgcgaaagcggacagctcaaaacagaccacgtagagaaggcaggtgactaggatgtcggatacattacttagagtagaggatttgaaaatttattatccggttgccggaagcggatttggaaaaaaggaattcgtcaaagcggtagacggagttacctttgaggtaaaaaaaggcgaggtgttcggaattgtaggcgagtccggctgcggaaaatccacactgggaagaggcgtctgcaaactggaaaatctgacatcgggtcatgtgtgtctggatggcgaagatattacagaatacaatgacctgagaatgcgttccgtccggaaaaaggtacagatggtttttcaggatccgtatgcgtctctgaatccacggatgtctgtttttgacatcattgcagagccgctgctggtgcatcatctgtatcaggataaagcggatctggaaaagaaagtgctggatcttttgcacagggtaggactggatgactaccatgcaaaccgttatccacatgaattttccggcggtcagcgtcagagaatcggaattgcccgcgcacttgcggtagaaccgtctctgatcatcgcagacgaaccggtttcggcactggatgtgtccattcaggcgcaggtcctgaatcttttaaatgaactgaagcatgatctggatctgacctacatttttgtggcacatgacctgagcgttgtggaatacatcagtgaccgtgttggcgttatgtatctcggtaatttcgtggaagtcggagaaaaagagaaaatttacagcaatccgatgcatccgtatacgcagacactgctttccgcagttccggttccggatccgacggcaaaaagagaaagaattctgctggagggaagcatcccgtccgcccacaagccgccgacaggctgcaaattccataccagatgtccaaaatgcatggaatgctgcaaaacacaggcgccggagcggtatgaagtggatgacggacattatgtatattgtcatctttatgataaagaaagaagggaacagcagaaatgaagctttttatcagtgcagacatcgagggctgtgccggagtggcactgaccgatgaaacacataagaaggaaagcgtataccagagattcgcagaggagatgaccgaagaggtcgttgcggcatgcgaagcggcacatgaagcgggtgcggatgagatcgttgtaaaggacggtcatggagatgcatccaacattgatccgctgaaaatgccggagtatgtcaccttgatccggggaaagagcggtcatccgtacaatatgatgtatggcatcgacgacagctatgacggcgtactgtatcttggctaccatgcaccggcaggagatccgaatttttcgatcagccacacatcgacaggaaacagcctgtatattcacctgaatggaaaagtgatgagcgagtgtatgctgaacagctatacggcagcatcacatcacgtaccggtgctgtttctttccggagatgaagagatctgccggcaggcgaaagaactgattccgggcattacgacagtggaaacgaagcatggtgtcggtgcggcaacgtggtgcaaagcgaaagaaaaagtgatttccgaaatccgcgaaggggtaaaaaaggcagttaccggacagaaaaaagagtgccaggtggctctcccggagcactttacgtatgaggtaacttacaaagactggaaaaaagcgtacacgatgtcgttttatccgggaatgcagaaggtagataccttcacaaataagctggagacagatcgctggatggatattgtcacagcacattgctttgttgtatattaagaatataaatcagatagaaacccaaagaaaagaggataaaacaatggatatagaaatgtttggcaagctttccgatgcatttggaccaagtggatttgaggaggatgttatccgtaccattgcagattactgcaaagaatttgatgtggaaaatgacgcaatgaataacctgtatgtgcggatgccgggaaccgagcaggattcccgtccggtcatccagctggatgcccatctggacgcatgcggttttatggtacagaatatccaggacaacggatgcctcggcattatcatgcttggcggcttccacctgaccagccttccggcacatgcggtatggatccgcaccagatccggaaagatggtacatggtattatctgcgcgaaaccggttcatttcatgacaacagcagaacgcaacagccagactctggaaattgaaaaaatgtatgtggatgtcggagcaaccagccgcgaggaggttgaaaatgttttcggaatccatatcggcgatccgatgatgccggatgtgacctttgaatacgatgcagagcatgaaatctgcttcggaaaagcctttgacaaccgtgccggctgcgcgtgcatcgtagatacgatgaaacagctggaaaaggagcaggcttctcttgcggttaatgttgtcggcgcctttgcagcgcaggaagaggtcggaacccgcggtgcagtggtaacaagtcagattgtaaaaccagaccttgccattgtatttgaaggatctccttccgatgactttttcatcagcgcaggacaggcacagggatgcatgaaaaagggtgttcagatccgtattctggacaacagctatatttccaatacgcagtttatttcactggctgaggaagtggcagcaaaatgcggaatcaaataccaggagagcgtaagaagaggcggaagcacaaacgcagcaaaaatcagcgtgacaggaaaagcagttccgtgtctggtgcttggtgttccatcccgctatgcgcacagccattataatttctgtgcaagagaagatcttgaagcggcaagtgcgatggcagcaaatgtgatccgggcattggatgaagaaaagatccgtcatatctgccatcaggatgtactgtaaaaaaatcggataacgaaagaaaaagaatgccggaagcgggttcacaggaaaggtgaagccgttttcggcatatctggtaaaaaaaggagagtttacaagtggaaaaaccgatcattggaatcttgggaaatacgtataaaacacagccgggacttttttcgagtgcggagagaatgtatgtcaacagtgattacatcgaaggtgttctgaacaacggcggaattccgatggcaattccggcagttgccatgaaagcggatccggaaggcatacttgccgtgtgcgacggcattctggttcccggcggagaggacttaaatccgtggtattatggggaagagccaaaaccgcagatccagacgatccgtccggagatcgacgaggcctggtttgcacttggacgggcagcaaaagagatgggaatgcctatgcttggcatctgcaagggaattcagtttttaaatgtcctgtgcggcggtgatctgtaccaggatatttatacacagaaggaaaccacaattttgcatctgcagtccctggagcggtcgtatctgcatcaccatgtggaaattaaagagggaacccatctggcagaaatcctcggggcaggtacccatgcggtaaactccatgcatcatcaggcagtccgtacgccgggagaggacatcctggtttcagcaacggcgccggatggtacgatcgaggcgattgaaagcagcaacggacagattgtgggcgtacagtggcatccggaagggctgattcacacagcgccggagatgaaccgtctttttgcggatctggtagaaagaagctgcaggtacagagaaaaaaggtaacgatttggaaccatgtaagagaaaagaaaaaccgggatgggacttttgaaccgttacgaaaaaatgagaatggataaagatgcgattccaaaagcagagagcaggaatcgttcgggaggcaaaaaagaatgaacagaacaataagagtatcggcggcaggtgatattctgattatgaaacggcttctgccgggatatcaggatgttttgccgattcgcgaatttctgatgcagggagaggttcggatggcaaatctggaaacaacgatatcggccggcagctgttacgcatcggcgtactccggcggaacatggctgacggcagatgcgaagtgtctggaagataccctgcgttacggttttaattttcttgggatttcgaataatcatacaatggattattcctatgaaggactggcgtctacgatctgtgaactgaaaaaaaaggacgtggcgtatgccggagcaggaaaaaatctttatgaagcatcgcgtcctgccattctggacacaacggcgggacagattgcggtgattgatatctgttctacctttgagaatgcagccagggcgggaagccagacggaacggcagccgggccggccgggcttaaatccgctgcgcttttcggaaaaatataccattacggaaaaacatgcgcaggatctcgcggagattgcagaggtgaccggaatcaacggactgcgggatctgcaccggcaggagggatttatcgctccgcttcccgagggtgtcatggaatttggcgggaaaatgtttgaaatcagcaaggatggaacagagggaagaagctccagcccgaatccgatcgatgtgaaacgcaccgtcgatgcaatccgggaagcaaagatgacatgtgaggcagtcctggtcatggtacattcccatgaaatccgcaaggacaacgacgaggaagcggattattttctggaagaatttgcgcacgcctgcatcgatgcgggcgccagcgcggtgatcgggggcggaacgcatcagctgaggggaatcgaactgtatcatgactgtccgattttctactgtctcggaaattttatctttgaaaatcagtatgtacgccttctgcctgcagactacatggaaaaatatggtctgaatattcatacagcagcatccatcggaattgccaggcggcaggagcagtcctcgcattctctctatgaaattccggaggtctatcggagcgtgctgccgtatttcgaaatctgtcagggaaaatgcacacatctggagctgctgccggtcgagcttggtatggacagggaaaatgcagaaaaaaatattccgtatgtggcagacgaaaaaacagcagaaaaaattgcagaatatctcacccgcgtgagcaggagatatggaacagaatgggaatacaaagaaggaaggattgtacttcatgcgtaaaaaatgggaaatagaagacgaataccgaaagttttgccggaacaacaaagaacttgcgctgcagacgctgcgggagctgacactgaccccgacggaaacgggaaaagaggagcagagaatcgcatactgtgtggagtggatgaaacggcagggcatggaatcggttcatacggatgagcttggaaatgtaatctgggagtatcggccggaacagaaaaagaaggttctgtatacggcgcatctggacaccgtgttttcgctggaggaaccgctggaaatcaaagaagacggaatgatctggcgttgtcccggtatcacagacgataccgtgaatgtcgtgatgcttctgatggcggcaaaatacgttcatgagacagagccggaacttccctgtggtctgatttttgcagcggatctgggagaagaagggcttggcaatctctgcggcgtccgcgcacttgtcgaccattatgaagaaaatctgtgcggaatggcagcctttgatctgtatcgggataaaatgtatcccatctgcatcggatctgtccgatatcggatttcggcaaaaacaaagggcggtcattcctttctgaatttcggaagaaaaaatgccattgcagagcttgcgggcctgatcggagagctttaccgttttcagacggatgcagcatctcatacgacatacaatgtgggaaaaatagagggaggaacctccgtcaatacgattgcgcagaatgccttcatgctgtttgaattccgttcggaagattaccggagtctggaagcctgcgaaacatatctggaggagaccatagcagcacgccaaagtgaggaggtacagtattcctgtgagctcgtcggaaagcggccgtgcgcaagagaaaccgatcctgtccagatggcgcgtatgacgcggtgtgtacagaaaacgctgaaggcagccgatggggaagagccggtatgctccgaagcatccacagactgtaatatcccattgtcgcggcatattcctgccatctgcgttggtttctgccggggcgggggagcacataccagagaagaatggctcgatgccgccagcgtagaaaatggcatgtgtgcagcagcagcactcgtatgccggcttccctggatgtgctgtgagagcagaatcgttgtaagggacgggatagaggatcaaaaagagagagaagaaatccggcagctgctggagctgtgcgatcaggattttgttccgccgctttcccaccgcaacagtacatcccagacgaactgggccgagacagaagaaaagacggatggaattgcagaatatctggagaatatctgcagtcagcatgtggtgctgtggaaggaagagggagttgtgcgggcctttatgacctggaaggatcattttaactgtgagaatctggaagcatatccggattcctgctatctgaccaccctctgcgtctggctggattaccggggacagggaatttcggaggtaatgtatgcagaagcagaaaaggacatcgcggcaaaatttccgggaagccggattactctccgtacctggtctacaaacggggcacaggagcatattttggacaaactgggatatggtcttgtcaggcggctgaaggatgaccggggagaaggaattgatacggtttattttgtaaaaaaggaagaaaacgacagataacatggtgcttgcaaatcgcagcttatagtgtcataatcggaagcataagacagcaaaaggagggctatagctatgccttgtacaaccattttagttggaaagaaagcatcgtatgacggttccaccatgatcgcgcgaaatgacgattccggtgcgggtcattatacatcgaaaaaatttgtggtgattcacccggaggagcaggcgagaacatataaaaccgagatttctcatctgaccatcgagcttccggacaatccgatgcggtacactgcagtgccaaatgcagaaaaaggcgagggtgtctgggcagcaagcggcgtaaatgcagcgcaggtcggtatgactgcgaccgagacaatcacatcgaatccgcgtgtactgggggctgatccgcttgttgtttatcagccggcggaagacggaaaagaagaggttccgggcggaatcggcgaggaggaccttgtttatattgttcttccttatattaaaagtgccagggaaggtgtcaaaagactgggcagtctgctggagcagtatggtacatacgagatgaacggcattgcatttcaggaccacgatgagatctggtggctggagacgatcggcggccatcactggatggcagtgaaagtgccggatgaccattatgtagccatgccgaaccagcttggcatcgaccattttgatctggaggatgcactcggcgagcagaaggaatatatgtgctcagcggatttgaaagaatttattgaaacatatcatctggatctttctatggacggaaattttaatccgcgcgatgccttcggaagccacgacgattccgatcacgtttacaatacaccgcgtgcctggttcatggagcgctatctgaacccgcacacgaaaaaatgggacggaccgaatgccgattacacaccggtatccgatgatattccgtggatgatggttccggagaagaagatcaccgtagaggatgtgaaatatgtactgtcctcccactatcagggaacaccgtacgacccgtatgccgcatacggcgataaatcatggaagggagcataccgctccatcggtgtcaaccggaccgatttcctttctgtcatccagatgcgcccggatcacaaaggagacaacggcattctgcagtggattgcgtttgcgtcaaatgcgttcaatgtgctggttccgttctacaccgatgcgacgacaacaccggagtatctttccaacacaacgggagaggtttccacagataacttctactgggcaagccgcatggtggcagcaatggcagatgcgtcctataagtcttctatcttccacattgagcggtatcaggaaaaggtgatggcaaaaggccatgcactgatccatcagtacgatgcgctgcttgcaggggagacagacgaaacaaagcagacacaattgagagaagaagcaaacaacaaaatcgctgaaatgctgaaaaaagagacgggtgcaacactgcacaaggtactctttgaactcagcaaccagatgaaaaacgcatattccagatcggatgcgtaaggctttttcaagcaaagactacgggagtacacagaatggttctgtgcgcaggaaaaactgtgcgcagaaccattttctgtccggaaccgcctcgaacaaaaactctccatgaaggctgcggatgttacattttaagtggcgttaggggttttgtgttatactcaaaatatctttttaaaatccggaaaaaacgtctgtcagaaaaaatccaatttttcaaaaattcgacatactataaatgtaactgttaataagtctttagaaaggagggggtcaaaatgaaaatttggacaccgattccagtagaaacaaaaaaagcgttagaaaggggggaatgtgtggggcaaacaattcaagattctccgtgggaggtcagcgttgaatctgtgattggatatgaatttgtaagagatatgcagatcaaaaaaacaaagatttttccgccgtcaagagaagctattccaatcgttggttggattaaatatatgggagaaactgcatctattgacgaagggatagacgaggacagtgagagacgggcaaaggaactgcttgtgaaattggcagagtacaagccacttgccaagatcgaggaacttgaggagcagaattataacatgattgatgagaggctcaacaatggagtggaaaaattcaatcgtgaggaagaaaagaaagaaaagcaggaaaagccggaagcacgttttttcttaaaaggacgactggcagccaagcagaaggaagcggcacagggaaaaaataaggatatgaaggatcaggaaaaatcaaaaaatacacatagggagatataagaatatggacaatctatttcgatagaagaaacaaatctgctctgtatattccagagcgatagtaaagaaaaggtcatagaagaaattcgcaagtcaatgaagcacattgacgatgatgaacttgttgagtcgtcggtgcgtgtgatagaaaaactgagttgtatgagtgatgaagagttttcaggaattgacatagaatttgtagaataatataatgggtatgtgcaatcaatgctggtggtgcagacccattttttaaaaaatagattattgctaatttaactgatatatgctaatctaattatagaccgtaggaaggcaggggtaatgcccgaatccaaatatttcattggcgggattaagaatggtatatccattcttttttttactatgaaagagggtgcattgaatgccaaatacagagttgccaatagatttggaaacacaggttgtgttaatgaaaaaatatgtaaattttcgccagagaaaaaagatgagggatttccttggatataagagaaggattcattgaaatgctgaaatattatccattggcaatgccaaagatttatgtcagcttgttttgaaactgtaaatattattatgaagagccgtatgcgggaaagccgcacgtacggttctgtgaggggcttacattgtgaggtgtaagtctactcgactgtgagggaaaaatgaaaaatatcagagtaaaattggttcctttagcagcagatggccgtgagcagttcatattggacaatcaatggtcgttcaagcacagtgcactgttggaattcggcgaacgtgataatcatattgatgcagacggagaaatcatatctcgcaaaaccgttgaaatgtgtatggatgcggaaaattcggaaacttacagaatcgttcttgacggcaaaaatgtaggaggtatgattttgcagattaacaaagaaaccaacgaaaatgagttggatactctgtttgtgttgccggaagcgcacagcaagggtataggatacggagcgtggcttgtcgccgaagctttgcatcccgaaacaaaaatctggaaaacctgtacgccgtattttgacaagcgcaacatccatttttatataaataagtgcggatttcagattgacgagttctggtgcgagcattttaagccaacaaaagaggttccggatgagacacccgatgaaggtcccgatgaaatgtttcatttcattaaggttatgaaatagctcggtagaatagtaggtaatgtaattccagttgtgcgcccagctaagggtgtgtagtcaagccggtgggattccggtttatccaaggtttagccaaccagataatagcgagtcttgggatgatgccggtaacggtatctgacaagcgtagacagcaagaaagcagggttgaatagtgattgagcttcgaaacgttaacttcagtcggtcgacgtcttaaccggtgcggaagacaatatcatgtaatgcgctatggcgagtgttatgtggcactgcggagtcagagaaccaatcatgttttacattgtgaatacacatcaactggggagaacctaccatttctcgaagaagagtatgaagttgcaactgaaaacggaggatttcaaatgaatggtaggtggtcggacaatcccatagtactgtagaaatcgggcaatgccgatggagggaagaggattgcatagtaaaggtcttattgaggacacattatccgtactcagggacggaggaaataatggaaacgaaattagtaagaatagctgagatatcggcaacatcaaaacatcctatatttacatcagtgtaccacttgataaatgaagatatgctaaagcaatgccataaggaattagatgggaacaaagcagtcggaattgacaaggtaactaaggatgagtatgggaagaaccttgatagaaatatcaaggaactggtacagaggttgaaaaacaaatcctttaagccacttccgtcactgagggtatatatacctaaaggaaatggaaagaaacgaccattagggattgcttcctatgaagataagattgtacaaatggcagtgaagaaaatactgggagctatttatgaaccgagattcctaaactgcatgtatggattcagaccgaatagggggtgtcacgaagcaataaaagaagtataccaacggataagctatggaaaaatcagctatatcgtagatgccgatatcaaaggtttctttgaccatatcgaccatgattggatgatgaagttccttgaatggaatatacaggataagaacttattgtggctaatacgtaaataccttaaagcaggaataatggagcaaggaaaattcgagccaacagaggaaggttcggcacaaggctcagtaatgagtccgatgcttgcaaatatatacatgcatcatgtgctgacgctgtggtttaagctggtggtgcaaagggaaatgcagggagagtgttttctcgtcaactttgcggatgattttgttgcaggatttcaatataagtcagaagctgaaagatactataaagagttaaaggaacgaatggaaaagtttggactggagctggaaagtagtaaaagcagactaattgaatttgggagatttgcagagcagaatcgtagagcaagaggagaatgtaaacctgaaacatttgattttctggggtttaccttctattgtagcaaaactcgaaagggaggtttcgtgccaaaggtacagacttcaagaaagaagttagagcaaaaggttagagcatacaagaactggatttacgataatcgaaatcgaccaatgcgagaaataattaaagagttgaacgtaaaactaattggacactatcggtattatggtgttacatggaattttcggaagataacaacattcctgcatagagtacaacagtttctattcaaagccatgaatcggagaggttgtagacgggcatacacatggaatggatttgtggaaatgcttaagtattacccgttagcaaaacctaaaacgtactattgtctatattgaagcgaatgttactatgaggagccgtatgcgggaaagccgcacgtacggatctgtgaggggctaagattgagaggtcttagtctactcgactcgttgacaatttttaggagaacaatggtataaaatgaaaaagaaaatatgggatttatatgcccccatttacgagaaagccatgagagccgattacaaatattacaagttcatgtacgacagaatcccgacaaagattcagaacaaggaagttctggaacttgcaacgggaccggggcttttggcgaagcatgtggcgtatgcggcgaaacggatggtggctaccgattattcggaaggaatgatccgggaagcccaaaagggaaaatgtgtggataatctgatttttgaagttgcggatgcgacagatcttccttatgagaaccattcttttgatgtggtattgatagccaacgcattacacgttatgccggaaccggagaaagctttgaaagagattgagcgtgtattaaaagaagatggactgctgattgcaccgaattttgtgtctcatcagtcaggaattatcagctgcctctggtcgggaattctaaggatcgccgggattacgtttgaacatcagtggagcggtgaggaatacctttcctggctcggacaaaatggctggaaggtacaatataagaaaagttgtccggcaaggatcacactgatgtatgtggaatgtatcagagaataataagatgttcttgttatgcaatttccagagtgttatactgagaacaggtaagaataaaccgtgtggatatacaggaaaatttcacacggtttattttaaaaaatggagttagaaattactaacctctatactgcaataaaaatgggaaagcagcagaagatcacagtatggggcaaatggataaaagaagaaaatcagtgaaagaaggatacacacaatgaaggaaaaagtagatgtaacaggcgtaccggagacgatgcttcagacgctgtatgccagagcaaaagagacaaaaaaatcagagatgagctggcctgttgaaactgtttccggaaaaatgttttatctggacggcgcgcattgtaagacgacagatgtagcagcggaaaatccggaggaaaaaggcgcctgcggaacaggtgattcctgtggaaacggtgtgctgacggtaacgattccacaaaaagacggaatggatgaatacgattatgatccggaaaatccggccgtgcatatcgtcgatatgtcccaaaatgagctggaagtaccggaagattacacagaggaagaaaaacggtcggatattctgacctatggaatgatcggggtaaaataccgcaatggttttgaacatccggaatatctggaatcggacaaaatctataagataacgatccggacgactaaactgtccaatatctttcttccgggacatcgtatgcgtgtaacgattacttccggagccaagaattttatgttcccgaacagtaacaccagggaaggatttaacagtgaaacaagacagaaagcgcatatcacgatccacagaggcggagcgtatgcgtccggtattctgcttccaatcgaagaatccgcgaaataaaggcaaaagatattgatttttaaataaatacggtatagtataaagaaaagcgaatactaaaaagtggagaggagaaatcttttccctttttttcgctaaaagtattgggggattacaatgaaaactgaagcaggaaaccgtttggggacggagaaaatcggcaaactgatgctggaactggcattgccgtcggtgttggcgcagattgtaaatgtgctgtataacatcgtggacagaatctatatcgggcgtattccgggagtgggcgcggcggcactgaccggggttggtgtgacatttccgattattacgattatttctgcatttgcaggatttaccaatggaggcggcgcgccgctggcagcaattgcacttggacagggaaataaaaaacgtgcggaaaagattctgggcaattctacatcactgttgttgttcttttcggtgattctgatggcattgtttctgatcttcaaatgtccgttgttatatctttttggggcgagtgctcatacgatttcttattcatctgcatatattaccgtatatctgatcggaacggtatttgtggaactggcagttggactgaatacatttatcagctgccaggggcatgcgcgtacagcgatgatgtcggtgctgatcggggcgattgctaatattgtcctggatccgattctgatttttgtgtttcatctgggagtagttggagcagcagtagccacggttatttctcaggcactgagtgccgcgtgggttgtccgttttctggtgtcggagcaatcggagatccggctgaaatttacggaactgaaaccggatcgatccattcttgcatccatccttgcactgggaatctccccgtttatcatgtctgccacagaaagtgcgatcacgatcgtaatgaatcacggattacaggtttacggaggagatctgtatgtgggatccatgacgatcctgcaaagtgtattgcagctggtctttgttccgattggcggattcaccagcgggatacagccgatcatcagctacaatttcggagcgggacagtttgaccgggtaaaaaagacgatccggctgatgctgacagttaccttatccgcttccctgatttatgtggtgtttaccatgctgtatccgggagtgtttgcgggaatgtttacgaatgatgcagaactgatcaaaatagtaaaaaaagtacttcctgtttatatggcgggaatgacggtctttggtgcacaaagcggcgtgcagagttcctttcttggactgggacaggcaaaaatctcactgtgtatcgcactgctgagaaaagtggtcctgttaattccgttggcactgattttcccgcatttctggggtgttatgggagtatattatgcagaaccggttgcagatattatctcggttgcgacggcggtcaccttatttgctatcaatattccaaaaattttatctgtggagatgctggaaaaggtgacacacgaggagaacggacggggatgatttgacaggactttggggaagagagtataatcccgtatttgacagttacaaaataaaaaaatcgctgtatcccttgattttacttggggttggcgattttttgcattgttttaaattatagtattttatcgtttacatcaataccatgatatcgttccaaatcatctctgattcttcgatagcctttatccggtgagtctgtatgaatcttttctatctcatcagcaataaacctattcttttgctcacttttaggaatttctctgtgtagccatttataataagctgctctagaaacattaccaagtttacaaagtgcagcaactgaataattatgatcttcatgttcttctttgattgcctgatatatatgttcatgacggaccaggcttagccccgcctcctctctatttcttcgagtttttttaaaaaagatgcctccatttcagcacgttctttctctgcttttaaaattttaacttcagcacgcagcttttctaattcactcatctcatcgggacgttttcgtttgccacggttatctcttaaagcttccactccaccagcttcatatttgactatataattgcgagcctgttgataggacacctgatattgttctgctgtttgggcataattacgattatgtgcgatacaatactgtactatttcaacccgttcttcaaaagtggtttttcttcctttggtcatgacaatgcttcctcctgttccagaagattttaattcttcatgaccattatacttctttatccaagtttgtaacttaccttttgaacggatcccgtattttttgcaaatatcatcttgagaaccacagcctgctaaataatctaagactgcttgttgtttcaattctttggaatattttttattccctttcaatgtgaatgcatttgctcccatcagattcaagtttgacgaggaggtgctttacatgaaaaagagtatatcaaggattatcggtttgataatgctgattatagctattgtatttataatgtttgcattgaaccatccagaaaagagttttccttggaataatacaattacgtggttactgtatggtgtatattttcttgtgacagtagtgttgcttattgctcctaaaatgaagcagtgagaaagtaatggaaaaacgaatgaaaaaacatgttgtccgaaaaaattccaaatttcaaaaagttcagcattctataaagtcgttcctgttgtccaggctgtcaaacggaaggtctgcatatgagaaaattcggtgtctctgatgtcgatcagctggacggttttggcagaccgacaaagaaggaaaagagaaaatctgcagacttgtgggattcagatattccaaaaaagattgtttttttctaatttccggttgtgtattttggtctcatgggtatatcctatatatggtaggtaggagatcctgctattctggtatatgaggaaactacggatatgcgttttttgtaaaaacaaaagaaagagagggatttatgtgaaaaagaaaatggtaaacatgttgatcgcagcagcagttagtatctgcatggcagccgcaccggtaagcgcagctacctgggtaaaagatggaaagggctggtggtatcaggaagataatggatcctggccggcaaatcagtggaaacaggtaaatgggcaatggtactggtttgacagcaacggttatatggcaaccggatggcggcagatcggcggtacctggtattacctgagtggaagcggcgccatggtgacgggatggctgaaccttggcggtacctggtattacatgaatggcagcggtgcgatgttaactggatggcagcagattggtggtgcctggtattatctgaccggaagtggtgcgatggcagcgaatacttggatcggggactattatgtagatggttccggtgcatggcttgttggaaaaacaaaatcacaggctggctggatcaaatccggaaaccgctggtggtatcgtcatgcagatggtggttacacgaaaaatggatgggagtacattaacggtcagtggtatttatttgacagtgccggatggatgctgaccggatggcagaaagtgggtggaacttggtattacatgtatgattccggtgccatggcagcgaatacctggattggaagctattatgtaaatggttctggtgcgtgggtacagaattccacttcttatccagcaggggattacaacgtaggaactgtatatggtccatcactgaccagagcagaactggaccaggtagctgcagctgtacagcaatttgtaaattcctatgattttgcttcgatgaacgattaccagaaagtacggacagcaatgtcttatctggaaagtaactgttcttatgcagatgactggagcaaaaacagggcaaatactgcatggggtgcgcttgtatatcacgaggcacagtgttccggatacgccagaggcttaaaagccctttgtgacgcgattggaattggatgctattatgtccatgcagacaataactcggcaaatccatcccatcaatggaatgaggtctgcgtaaacggacagtggtatattgcagatccacagctaggtatctccaccgtagaagctgctggaatcccattcctgatgtcggaaagtacctataccggaatctttggaatgatatgggaccatacaggacttccgaattgtccaaacgattaccgttaacaagaaaacccagattacctattggagtctgggtttttttccttaaatcaattttgaacttttcagaactttcgccattgacggtgtagtatgctatacgctgttctgcatttgggttaataagtgtaagcaatgcgcaagctatttcaatgttttgtacttaccatttgcttatatgagagttaaaaaaatcaaagaaaaagtatccctaatgctatgctaaatggtattggggattttataatttacccaaaaaatcatcctgaaaaaatccggaaaaaacgtctgtccgaaaaaatccaatttttcaaaaattcgacatactataaatgtaaccgttaataagtctttagaaaggagggggtcgaaatgatcattttgacaccgattccagtagaaacaaaaaaagcattagaaaggggggaatgcgtggggcaaacaattcaagagtctccgtgggaggtcagcgttgaatctgtgattggatacgaatttgtaagagatatgcagatcaaaaaaacaaagattttttcgccgttaagacaagctattccaattgttggttggcttaaatatatgggagaatctgcactggtcctatgtcaagatttagtacaagttaaaatgaggttttccccatcttaacttgcttgaaaaaatatgtacagcattaggcgtgacattatcacagttttttcaggaaggtaattcggagaatctgacagaaaaaagttctagggatatggaacgacctgagtacaaatgagcaggaaacagtaatgtcaatgctgcgtggacttcggaagtagaagaacagttcgagtatatgtatcggctgttctttttttattttttggcgttaaaacggtaatgtttttcttgtgtacggtagagtgctatagtataataaaaccagtttttttgcataagtattaaagttataatatggaaattggaaaaccagatgaaagtctgggacgcaaagctacagggcctgcaaaatggcagctagttgcatgaaatgaggtggggctgtcgcactaattagtgcgcagctccttttcttgtgcaaaaaaataactgccagacctcgaaagaatccggcagttggtgtaaaatcaagttatgctactaactaaattattacaaaaagattatacaaaaaattcagacggatatcaacttaaacttccgttaaatcttgaaacaatcattccggataatgattctgttcgattactaagtcagtttgtggaggctatggatttgactgacctatattctacttatgaaagaataaattctgtatcgcccagaacacttttgaagatcgtgctctattcttacatgaacggggattactcctctcgttccatggaactaaattgtaaaagagatatcaattttatgtttcttctagaaggttccccggctcctgatcatgcaacatttgcaaggtttagaagtatccattttgctccctgttctaaacgtatccttgcagaaatgtctaatgcattgtttgatatgggagaaatttccggagagaccatttttattgatggtacaaaaattgaagccagtgccaataagtatactttcgtctggaagaaggcagtaacaaaaaaccaggcaaaacttttgcagaaacttgctgattttgtggctgagtgtgagttgctttatgatataaaaatcgtttatggaaatacgataaaaataaggcatgtaaagaagctccgcaaaaaactgtatgcattaaaagaaactgaaaatatagtgtttgtgcatgggatcgggaaaagaaaaacttcactgcaaaagagtattgaaactcttgaaagttatttgaaccggctcaaaaaatataaccagcagatacatatctgtgcggaacgcaacagttattcaaagacagatcatgatgctacttttatgcgaatgaaggaggatgccatgggaaacggacagttaaagcctgcttataatcttcagcatggcgtggattctgaatacatcacatggcttaccataggtccccagcctactgataccacaacgctgataccatttttgaaagatgcacaggagcatttgaaattcaaatataaaaacataacagcagatgccggatatgaaagtgaagaaaactatctgtttctagaagcaaatggtcagctttcttatataaaacctgcgaactatgagatttccaagacccgtaaatataaaactgatatcggtaagatagaaaatatggagtatgatgtaaaaaaagatatctatacctgcaaaaatggtaaaaaattaggtgtagatcatatccgccactcaaaaagcaaaacaggatatgtaagtgaaaaaacgatttataaatgtgaggactgtaatggatgcccttacaaaagcgaatgcatcaaagggaataactgcaaaacacccttggaagaacggacaaagacacttcaggttgcgaaaacatttctaaaacatagaaaagaagatttagaccggatactctcagaagaagggatcctcttcaggacaaaccgaagcatacaggcggaaggctcctttggcgatttaaaacaggatatgcagttccgcagatatttgagcaaaggaaatgcaaatgttcttgcagaaagtacgttgcttgccatggcaagaaacataaacaaactgcataataagattcaaaatggaagaaccggaacacatttatttccgataaaaagtgcctaaattttgacttatcaaaacaatttttcaagccatcaagaatggcttattaaagtgcgtctttaataatagcctgtaacaatgaaaagcgttttttgatggattttatccttagaacagcaaaaaggaagctgccgcttcacgaaaattcattcgttaatgccacagcccactaaggcgataatttcaaacgaacagaaaagtggcattcgcaaaggcagcaacagggcttcaaccggcaaggttggagccttgttgctatcagtatatatatagtataatcgcatctttgcgttttttgcaactgccggagtataatggaagcgtcaggaggtgccggacaatgaaagaacagaagtatcatatctatctgaccgagcaggaacggtcggaggttatcaaatccctcatagacctgaaaaacacgcttatccggcagggcaaatacacggacgccgttgacgatgtgctggtgaagctgaccggcgcaaagcgaaaaaagctgaaggtcgtatacatctgaatagagttcgagccgcttattcccaatcggagtaagcggctcttttcatttcaggtatagctttccgccaaagagttttccttgaaatggcggttgttttccagcagctcatcaaaagttacaggcttaaagctgtttatatccacaccggcattcaaaacattctcccgtgcggcaatcagcggccagaagtctgccctcgtatcattatgaatatgcccgtggatcatatatgaccgcttcgcgtgcttccacgaaagcatcgggtaatggcatagcgttaaagagcgctttccgtccgaggtttccaaaaacctgtccacgctgaaaaaataccttgcgtagtcaaacttcgtcatccacgagccgtcgtggttgccgacgatcagccgcttcttgcccttcaaccgcttcaggattccctccgcattggtgctgcggaaaaacatatccccaagaatatataccgtatcgtttccggtcactctatcgttccagttttgaatcatcgcctcgtccatttcctcggcggaggcaaagggacggtcgcagaaccggatgacattgtagtgaccgaaatgcgtgtctgccgtaaaataaatcatcgtgtatcatctcccatatataaagtaaaagcagaactgctcaccgaacagccctgcgcgaaatcaggatagtcctgtactatccccgttttcgtctgaactgaccgtaattcgttatgaagcaaaaagtccgggaggacaaaccgagcctgcttattatctctttgcttctgttgctgccgttcgtcatagctcttgccctccttccataagcctgaccacagtatactatataaatatgaacaagtaaatcattcaaacgcaaagccgcttttccgttctcggaagggcggcttttttgctttccaaggggcacgaaaaattttttcaactttttttgaaaaacaccctcaaaaatcgcttccttattcagagtaagtgaaggggttctttcccaaccacaatcgggagccgcttcgtgaaccttgaaaattgaatatacaggcacttgggacattacttctgatgattagcccgaagatgggtacgccgtgacttctcctaaccggaggacgagcgagaacccccgatctgaaacccggattgccaccgggacggcgatgacagtcagaaggattatgatacttctctacggagctggcggagaacccggcagaggtgaaagccctatgacacggtgcagcacaccgtgacccaagtgtttcccggaaggcgaaagccgccgcagggggcgttgaggacaaatactgcggacatatacatagccgttcattacaggcggctatgaaatctacaaagaaggaggaaaacgaaagatgccaaactgtaaaaccatagcgatatgcaaccaaaagggcggcgtcgggaaaaccaccacggcggtcaacctcggaatcgggcttgccatgcagggcaaaaaggtactcctcatagacgcagacccgcagagcgaccttacggcctgcctcggctggcgggattcagacagtctgccgcagacgctgaccaacaagctggcggcggtaatgcgcgaggaaagccaagacccatttgccgggattctcagccacgaggaaaaggttgaccttgtgccgtcgaatcttgagctgtcggcgctggagatgagccttgtgaccgcaatgagccgggaaagcgtgatgaagaactatctcagccaagtaaagaacaaccgttcccagcttcatgtccaagaacgcataccgtgcgcagagcgtagagcttgcttgggacggcacaaattacaccgccacgctgaccgacagcaaccgtgtcctctcggattacagcttttccgcaaacgaggacggcatttccttcagcgtcagcggaaataaactcaccattacggcggctaatgcgccctccggcagcgtaaggatcaccgccagtaaaaccggctccacccgccgaggtatcatcacctggacggacggcagatacgcacccggcgcaggcattcaggatgtcatcagctacgcacagtcagtcagtgaccccgtgcaggcgtttctcaacctgaaggtgtcctacggctctgccaagatcgtcaaaacgagcgaggacggcaaggtggacaacctcacctttaccgtcaccggcaacggggtcaatcagacggtcaagaccaatgcaagaggtgaaattcagatcgacaacctgatgcccggcgtttacaccgtgaccgaaatggactacgacaagtatgagccgcaggagtcccgccgtgtgacggtggtttccggtcaggtttctaccgtgaccttcaacaacaagctcaagcgtggagatttgcggatcgtgaagtcctcggaggacaatctcaacgagggcgtgaccttccacctttacggcacttcactctccggcattgccgtagacgagtatgccgtcacggatgcaaacggcgtggcgagctttgaagatgtcctcatttccggttccaccccctacaccgtggaagaagtggacactgctgttcgctatgtcattcctgaagcgcagtctgcgcctatcaactggaatgaggtcacgaaccgcagcttcctcaatattttgaagaagttttctgtgaccgttactaagagcgacgctgaaatcggcacggcgcagggtgatgcttctcttgccggtgctgtttacggcatctataagggcgaaacccttgtggatacctacaccaccgacaaaaacgggcagttcgttactaaggagtatatctgcgataacgactggacggtgagagaaatcactccctctgagggttatctgcttgattccaccgttcataaggtcggtgcagagccgcagctttataccgtggagcataatcagacggcgaacgatgtgaccgagcaggttatgaagggcaatatcgccattattaagcacaccgataacggtgaaacacagattgaaacgcccgaaagcggcgcagagtttgctgtgtacctgaaagccgcaggcagctacgaggttgccgaggacaccgagcgtgattatctcacctgtgatgaaaacggctttgcccagaccaaggatatgccttacggcatctacaccgtccatcaggtatccggctgggaaggcagcaagctgatgcccgactttgatgtgttcatctctcagaatggggcgacttatcgctaccttatcaacaatgcaccctttaacagcttcatcaagatcgtgaagcaggacgcagaaaccggcaagactatcccttatgccggtgcaggcttcaagatttattacccggacggcaacctcgtaacaatgaccttcacttacccgacgcccaccaccattgatgtgttctacaccaatgcagaaggttctcttgttacgccggaaaagctgccctttggaaaggggtactctattgtcgaggtacaggctccctacggctatgtcctcgatgaaacgcccgtgtacttcgatgtcacggaggataattccacagaagaaagcggggttacggtagtaaaagtggataagcccaatatggcacagaaaggcaccatcaccgtggaaaaaaccggcgaggtgttcttcggcgtttccgtcatcggcggcgtagatgaaagcggaaacgaactgcccaccatctatcagccgcagtatgaaaagcgtggacttcccggtgcggtctatgagatcatcgccgcagaggatattatcacgccggacggcactgtccgaaatcagaagggtgaggtcgtggacaccgttacaaccgatgcaaccggcacagccgtgagccgtgaactctaccttggcaaatatgaggtgcgtgagatcacagcaccccacgggatggtgctcaacccggaaccccactgtgtcgagcttgtctacgccggtcagaatgttgctgttaccgaaacggcgacctctttcgagaacgagcgtcagaaggtggaaatcagccttgtaaagtccatcgagcagaatgagcgcttcggcatcggcaataacggtgaaatgaagaatatttcctttgggctgttcgccgccgaggaaatcgtttctgccagcggcacttccattcccacagacggtcttgttgagatcatctctccgaatgaggacggaacggcaaacggcaagctggacgacagtgatgaactgctcggcacactgaccgaaaaggaaatcggtgaatacggtatgaatgacctgttctatggtcgctacttcgtcaaggaaaccaaagcgccggaggggtttgtccttgataccggcgtgtatgaagtgatgatcgacaccaacggcaagacctacgaggtggagaacaaggcaggcgtcggcttcgtcaatgatgctatgcgtggcaacctgaaaattgtcaagacctcctctgacggcaaggtcaagggcttcgctttccgcattaccggagcaaatggctatgacattatccttgaaaccaacgacaagggtgagatcttcattgacgggcttcgcatcggggactacaccatttctgaggtaagcaactcggcttcttcgatgtatgttatccctgctgataagaaggcaacgccggaacggaggtcgtttcggacattcttattctgcaaaagcgtgaccgcattgtggatatagagccggattgggtacagctcggcacagatgaaaacggtatcctgatgaacaggtactttgttgagcatcccgaaatgatactcggagagatgaaaatagtgtcggggcgtttcggtcccgaagccacctgcgtccctttcgagggggcagaccttgccgggcaactcggcgaagccgtttccaatattcacggtgagctgaccgcatatgaggtggtggatgagcttgcagaggaggacaattccattcccgcagatcccaccgtccgtaacttctcctatacggtgctggacgataaaatctacttccgagaaaacagccgtatggctccggtggaggtatccgctaccgcagagaaccgcataaagggtatgatccgcatccgtgattcggtcagaacgctgattgaattgcagacagaggattaccccgactcggaaattaaaacggagcaggagcgattaaacgctctttatgataccttttccaagcagtacggacttatcaacagccgtgccaacatctccgccttttcacaggacagctccttttctctgctctcggctcttgaggtcttgggcgatgaagggcagcttgaacgcaaggcggatatattctacaagcgaaccatcaagccacacaccccggtcacttccgtagataccgccagcgaagcacttgccgtttctatgggcgaaaaagcccgtgtggatatggattatatgtgcgagctgaccggcaagaccgaggaagaaatctttgcagacttaaagggcgttatctttctgaatccaatgcacgggtacggcaattccacgcaggcaaagtatctgatggcagacgaatacctctccggcaacagccgccttgtggtggtggcaaagcgtatagtagagggcggtgatgcggatgctgcccagacttacgccgaagcatcggcagagagccaacgccctgattaaacggctgtgcgccaattatgaaggcggcaactgccttgcgctggatgacggcgagccttgcgtctgtgtgcagagcatttcctattcgctgctctgcaagtatttccgcaatgccgttttgccggcagagccgatgctggaggctaatattctcggcacacgccttgaaaggtgcgtgtcctgcggtgcgcctatcctcaagaaaggcaaccgcaagaaatactgcgacaggtgcgccgtaagagcctacaaaaagcagcaggcggaatacgcccgcaggaaacgggcagagtcgaaaaatagaggctgagaaagtcagtcacagcaaggcttttcagctcccgcactttggggggcaaggtgttgatacctttgccccgctttttcaattcaggggcgttttgatgcgccccggaaaggagggaaaatgcctaaaatcaaaacaagagatgtggtgaaaggcacgatcaagaagatagacaaggcggcgattgctgccgaccggatgcgctccgcctatgtgcagaccaaggagaaggcggaacacgccacccatcccgaagaacacagcgcagaggaatacgcctccggccgcatcgagggcggcgtagaccgcatgacccacgaagcggcgcatcagttcgataagcagggacgcaaggggctggctgaaaccaagcggaatgtatccaaggcaaaggacagcatcaggcagttcaaagagaaacgggcggcagaatcgttgaaacggcagtctgtccgtgcttccggcaataagactattaagacggtggagcagacggaaaagaccgtcaagcaatccgcccgttctgccggaaagaaaacggtcaagaccgcaggcaaaggtacggcgaaagcggcgcagaaatcggtcaagaccactaagaccgccattaaaaccacccggcaggcggcaaagacggcacagaaaaccgcacaggcgaccgtgaaagccacacagaaagcggcacaggccgccaaagccgcagccaaggcgaccgccgccggtgtgaaggccgctgtcaaagcaaccgttgcggcggtcaaggcgatcatagcggcagcaaaagcattggtagcggccattgccgcaggcggatgggtcgccgttgtggttatcattgtcatctgcctgattgcgttgatctgcggttctgtgtttgggatattcttctccggtgaggattccggcacgggacagtccatgcggacagccgtgcaggagatcaacacggaatacgacaacaggctgttggagatacgaaacggtacttcctatgatacacttgaaatgtcgggaagccgtgccgtatggaaggaagtccttgcggtttactcggtcaaggtcaacaccgatcccgacgagccgatggaggtcgccacggtggacgataccaaaaagcagcttctcaaggatatattttgggagatgaacagcatatcctcccgcacggaaagccattcggaaacggtcatcaccgaaaccgatgacggcaacggcaacatcgtgcagaccgaaaccaccgaaacgagaacgacactgtatataaccgtgtcgcataagccggtggaggaaatggctgaccaatacggcttcaatgaagaacagcgagaataccttgcggagctgctggaggacaagaacaactccctttgggcggctgtcctctacggcatccattacggcgacgatcagatcgtgaccgttgccttgtcgcaggtgggcaatgtgggcggtgagccttactggtcttggtacggcttcgggagccgtgtggagtggtgtgcctgcttcgtgagctggtgcgccaacgagtgcggctatattgaaaccggcgtaattccgaaatttgcaggctgcgtcaacggcgttcaatggttcaaagaccgtggacagtggatcgacggctctgctgagcctgtttccggaatgattatcttctttgactgggacaacaagggcagctccggtccgcaagacgggcagtccgaccatgtaggcattgtgcagaaggttgaaaacggcatcgtctataccgtggagggtaactcaggcgatagctgccgtgtcaatcagtacagcgtagggcattatgaggtgcttgggtacggagtgcctcagtattagcctgcacggtattgcacgaaaagagggaaatggctgcctgcgagggcagccaatacataccctgatgtgaggaaaatgcgacaattcgttaaaaccaacgtccgtgtgggcttgcttttattcggatattcgtatataatgtatcgtgttgagtattatccatgcggaggtgcggtatgaacgggatcaagggctatatctccattcgggaggcgtcctaccgttggggcgtgtcagagcggcgggtcaaccagtattgcgccgaggggcggatccccggcgcgtcccggttcgggcgctcatgggcgatcccggaaaatgcggaaaagccgtccgacccgcgctttcaggaacagcaccgcgatcccgacaggacaagcacctgacggatacccctctgcattttagcatccgcaaaaaggaagtgaacgctatgacctgcgatgagagcttgtaccgccaatatctgagcggcgatgacgaagggcttaatgccctgatgaaaaaatacggtgaccccctgaccctgtatattgacggctatctgcatgacgttcacgaggcggaggagctgatgctcgacgtctttgcctatctgttcaccaaaaagccgaagatccgggacggcggcttcaaggcgtatctctataaggccgcgcggaatatggcgctgcgccataagagcaagcgaaagcccctgttcagccttgatgcgcttgcagacgagccggacggacggctgctggcggaggaggtcatccggacggaggagcgaaaccgcatcctgcatttctgcatggatgaaatgaacccggactatcgggaagtcctctatctcacctattttgaggatatgagctacgcgcaggcggcggaggtcacgggaaaaacggtaaaacagatcaccaacatggtgtatcgcggaaaagagagcctgcgaaggctgctggaacgggaggggatcacaaatgcgcagtcatgaggaacgggtcgtggagaccaagcggcgcattgctgcaatggaaaggaaaaaacggctgcggcgcaatacggtcactatggcttccgccgtggcggcgtgccttgtgctgctcatcggcgcgtccctcgccatgcccggcattgccgcaaacatccagacaggcgactatgcgggctttgaaacggcggccagtatgtacggcggcagcgcggccttgggatacatcgtcatcggacttttggcgtttttactcggcgtgtgcgtgaccgttctgtgcttccggctgcggcagatgaaccgggaggacgatcagaacaaagaacgcgaggggattcatggagctgattgagaacctgctgcaattactgaccacgttcgtcggcgcgctgctttcgggcatcgcctaccggaaaagccgcaggcaggcttacttcctgctgctttgcttctacggctgctttgccctcggcgcgctctactggacgctgtatctgctgctgttcgataccacgccccgggtcttttatgtgtcggagttcggctgggtggccagcctcatcttcctgcgcattttgcaggccactctggcgggagcagatgagcgaggcttccgctgccgcagggcgtggctcgcgcctgcgttcggcgtgccgctactgacgttctactgtgctttcggggatattctctccaacctgatctggtgcggcatgatgatcgttctctcttactgcgccatccgggggctggtatacgccaatgggcagacgggtgcggcgcggaatatgcggcacttccacatcggcgtgctgtgctttgccggttcggagtatctgctctggacggcgggctgcttctggcccaacacttctcccgcaaaccccaccttctggtgcgatatgctgctgacgcttgcgattctgtggctgctgcccgccacgagaaaggcggtggaagcgtgacctacatcgaaaatatcttcctctgcatggtatctcccctactggtggctgccctgtgcatgggcaggcggcagctccgctttttcctgttctgcattgccgggatgggggtgtgcctgctttcggcttacatcaacaccttcctcgcggcggtgtgtcaggcggatgcccttgccgccacggcggagattgcgccggtggtggaggaaacgatgaagctgttgccgctggtgttttatcttctggtgttcgagccggagggcgataaaatcaaggccgccgcaataacagtcactctcgcctttgccacctttgaaaacgtgtgctatctcattcagaacggcgcagaccgcttctcctttatcttcttccgtggcttcggcacgggagccatgcacgtcctctgcggtttgatcgtaggcggcggacttgcgtatgcgtggcggcggacgtggctgaagatcgcaggcacctgcgggttgctgggcgcggcgataacattccatgccatatacaatctgctcatcgcctacggcggtgcggcgcagtacatcgcctacgccctgccggtgctgctggtggcggtgggaaggttgtccgctttccgcttatcgcggagaaaataaccgaatattccctctttgagagctgctttttggcggctctcaatttttttgaaaaattttgcgttttgggtgagagttttttcgattttttgtacctatataagtgaaagggtttttatcacagttccagacaaaccggaaagggggggcaaacgaaatgtacgataccgcaagacgggtcgcactcgtcaagcagcgggtgcgggaaaacacccgccgaaggcagcggcgcggcatctatggactgagcgctatgtgtatgctgctgttcgcggtcttgatgcaggcggcgggcacggtcgtcgctccggggcaaccggaagcatggggtgcgttcggcgcgatgctgctgcgggaggacgcaggcggctatgtgctggtggccgttgtctcctttgcagcggcggtgatcatcaccgcgctgtgcttccggctcagaaacagagaaaatcagaaaaaagacggggcggacaagcccactcgacacgaacaggaggaggaaaaccaatgaaaaaacgaatacttagcatcctgctgctgtgctgcatggtgctgaccatgcttccgacaacagtattggcagcggacgggccgatggataccataccaaagtacgacgtgagcattgacgtgtacaaccggacatcggacatatccattaaggacagtcggagctactacatctactcgtccgttcccgataagctcagggacacatgggcatgggataagaagatattcatcaagggagataaaaccgcgccgcacgtatttattgacggcgtaaatatcgagatgagtcccagttccaaggggccggccatcgagctgaacaaaaaggcttcggcttatctctatttcatcggcaaggacagcaccctgcaaggcgccgacggccgcgcggcgatccagaaaaaccgcagcgaggggcagctttatgtgctggcacgcaccggcaccacggtgacctgcaagggcggctacagagcggcgggcatcggcgggagctgggcgatccgcaatatcggggactctatgtttaacatggatatgtacggccacggcgtcaatatgcactttggctctcagagcaatcccgactactggggcggcaccatcaatgccaccggcggcgagtacggcgcgggcataggagccggcagctggggacactctggacactctggaaacaccatccatggaggcgccggagagcggctgtacttctactccggcacggtaaacgccagcggcggcaggcttgcagccggaatcggcggaggctttagggggcgcggcagccatatctatatctatggcggcaatatcgacgcgcaaggcggggataccggcgcgggcatcggcggcggcagctggacgacgaaacaggacatggacggaatcaacgcggcgagcgatatcgtcatctccggcggacgggtaagcgcccgcggccaatacaactgcgcgggtatcggcggaggccagtatgtccccgcccggaacatcaccatcaccggcggccatgtgtcggcgacaggacactacggcgcggcgatcggcggcggccgctggtgccacggaaagaacatcaccatcaccgacgcgactctgaacctgtcgaccaattaccgcagcaacggctcggacgcggcggctgtcggctacggcgacattgtttacaaaccggagcagctcgtggcggatccgtcaatcgcgacgaacgatcagatcaggatcggctcatacaagggaaagctggtgaagctgaagctggaggcgcgcgccctcagccgtgatgacgaatattcttacttctggaacctttatgagaccctgatccctgatgagaatgggctcatcgacatgcagctgctgacacttccgtatgtacagaactacggctgggcgatcaacgtgctggaaatgacagtgatcgacgacccctgcaacggaaatcacgacttcggctgggtaaaccggcagtcatgccacgtctgggcgtgcaggaataaggattgtcaggcgcgcgacccggcggcggagatgtccaaacaaaacggaaagcacatccccggagactggggcactcaggagaagcactgtgccgtgtgcgatcatttgctggaaaaggacacggcggcgccggtgctggaggttttgaatgacggcgagagctacaccgtcgaggatgtcatcgttggaagaccgggcgcgtactccttcaccgtgagcgatccggcgaagagcggcgaagcgtcctccggcgtcaagtccgtgaccatcaacggtgtggagcagaaggccgactccacctattattctcttcccgcacccgacggcggcaacaatgacgcgggagcggaatataccgtcgttgcgacggacaatgcgggcaacgcctccacggcaaccgtgaagatctaccggcggcatcgagtgagagtcgtaagcccggatgagcagacgacatacgccgaggcagagctggcgcacaacgagtatctggtgctcacgatgaagatgccggatggtgcggcggtaagaatgaccgacaaggcagatcattcggaaattccatatgacaaagaaatgggacgcttcacggtaggtctgatcgacagaagccggacgctcgtgctggagtataacacggagtatccgaaggccgagcttattctggggcggagtcagtacttctttggatacaacgcggatacagccgaaccgcactatctcaaggatgtaagcaggaaaacggataagaacgtctattcggtggctgtgcagatcaacgcggatgtaatacccagccactacttcagctcaccggtatgctacacgcaggaggagctggcggagctggacaagcaaggaaaaatcgcatgggagaaatatcagcatccggagccggaaccgggcgtctggatcgtctatattcccacagccaccatagacatcgcggagtatgacgcaaacggcagctggtatgtctatgcaaaagccgaaaacctcaagggaacgacctatgtctccacgccgaagctgatcgccgacgtcgaaaagccgaaggccatcaatctttctaccggcaaggaactggagacggatggggaatactggggcgacctgcggttcagggtagaggacgcgctgcccgtcaaggtgtggcacgagagatacccgggcgggaatattgaacttatgacgccggatgaagacggctgttatacgatcccggcagattatgacgtgaccctccatcacgacatttgcatcgaggacgcctgcgggaacaaaacctactacaatgacatcgatattttgtggaactatctggaggttgttcgggagaaggactattgggatgtgcagcctgcgcagccgattcgtatttccagggaacaggatctgcaagaggagctctccaaggtcaacatcggggtttttgcatctgacgtcaccggttttatccctgtcgatgtttcgtgggagatcccggaggactatgatccgcagtccccgcgggagcagacctttaccgtcctcggcacggtgattctggaaggcaccggagcacgctgcgtctcggggcttgatgttatcacgcgtccgggagaggaatggaagaagaatttcgcaatcagcgtgacagtggagggcgcaccgcgctacaaggtgacgacagaggatagcgcaaacggcagcgtcacggtggtgaatgccacagaaaccaccgaggacggcacgccgctgttctataaggacgagcttgtcatgctctccatcgcccccgacgagggctatatgctcagcacgctgtccgtcaacggcaccgctgccgccgttgcggttggggaggatgcctataccttcgcccagccggaggaaaacgtcaccataacgattgaaaggtcagaagatcacatgacatgtgaatttaaaataaaagataatggaattggaatgtcagaagaatttataaaaaatgaattgtttactccatttgtacaggcagataattccccacgttctgattataatgggacaggtctgggaatgcctattgtgaaacaacttgtagaaaagatgggtggaaccataacagttgaaagtaagctgggtgaagggagctgttttactgtagtacttccatttgaaattgatacgaatgcacgaccggaagaaaaagaagatttcaatgcagatatatcaggtgtccggatattattggttgaagataatgagctgaatatggaaatagcagaatttatgctgacggaaaatggagctaaagtagaaacagtgaacaatgggttagaagctgttcagcattttgaagcttccgaaccgggaacatacgatgttattttaatggatgtcatgatgccggtgatggatgggctcactgcaacaaaaacaataagatccctggaacggcaggatgcaaaaacaatccctatcattgctatgactgcaaatgcatttagggaagatgctgaaaagtgcattgccgtgggtatgaacgctcatttggcgaaacctttggatattgaaaagatgaaaaagactattaaaagtatttgttcctaatatacgaggaaagaataaaatgaaaatgaataaatcagtattgcaaaggggtatcatttttatattgtgcattagcatccttttttcaatctgtccggtttatgcttttgcagcaggaaatcagaaagagaaaattgtcaggattggtgtaccagatgcaaaatacgtgaagagttgaggcgttttcgtattaaattgaaattagggaaaaggcatgtgaaatacgatgatgaaaaataactatataaaacaaaaaagaaaagatcaaaatccggtaaatcattggaaaatttttgagggacagttggtattccttctggcaatggtgattttgtttgttgttgcatatacttttattttacaacaagcatataccaaaactgctctgaaaacagaaattgaacgagatatttccagtgcagatgcggttcataagctggtaaatgacagactgggacgaaaagattttaatgaaataaaaagtaaagctgatgagaatacagaactattcaagaatatgtcgacatatatgaatgaaatcagaacgctgaattctacgagatatatttacacagcaaccagaaatgaagacggtagattgatttacgttgtagacggactggatccatcggctggtgacgtcagacatccaggagatccgattgaaaaggagatggtcccttatatagaaaaagcactttctggaaaaacagtatattctcaggatattgttgatacaacatggggacctatttttacagcctgttatcctgtgacagcggaagatgaatctaatgaagtgataggtgctttctgcatagaaatggatatgcagaaagcgtatggaatggttgagaagacgaataagctaagtattgtgctgggatgcattacagcgtgtattttgttaatattatgtacctgtggatattctgcatataagaagcaaaaagaaaatgagcagaaacagcaaaaactgttgcaggaagctgcaagactggccgattcagctaataaagcaaaatcaacatttctgtttaatatgtctcatgatattcgtgcccctatgaatgcaatcattggatatgcagaattgggagagaaacatttaaaggagccaactatattagaggattactttgaaaaaatattattgtgcggaaagaaaatgctgcatttgattgataacattcttgaattagcacgaatcgaaaataaccaagcaacgctggatgaaacaataacagatgtttctaaaaactttgatttatgtattgatatgtttaggaaaccgatagaagaaaaacatcaaacactgaaagtcaataagaacattcgatatccatacctgtatatggatgatgcaagatcatctgaaattacgattaacattttgagtaatgctgtgaaatacacgggtgaaggcggtaacataagctgtacattgaaccaatatcccggcgaaaaagaaggttggagtgtattagagcttatcatagcagacaacggaatcggaatgtcagaagaattccaaaaacatatttttgaatcattttcacaggaacgatcttcgtcagacagcggaatagaaggtagcggacttggcatgggaatcgtgaagaaactggtggatttaatgaatggcaagatcacagttcagagcaaaccgggagcaggttctacttttacaatcacgattccattaaaaatagcaagtgcggaagaaaggaatccgaaacatgcagacggtcagttgaatatcaaaaaactggaaggaaaaagggttcttctggtagaagataatgacttgaacgcagaaattgcaacggaacttttgacggaagagggaatcatgatagaaagagcggagaacggcgttgcatgtattgacatgtttaacaaagcaaagcaaaattactacagtctgattctgatggatattcagatgccgattatgaacggatatgaagcatccaggagaattcgagaactgaaagacggtaacaaatcgcagattccaattgttgcaatgacagcaaatgcgtttgaagaagataagaagatggctttggcaagtggcatgaatgatcatgttgcaaaaccaatagatatgaatgtattattgccgactattatgaaatatatgtaaaggaagaaagaaggacactgagtttgtgaaaagttaattctatggattaactatcaggtgaggataattaaagttgtggaaacaactgcatattataaaggataatatctgcgagtaaaaaagtctgcataaaagttaagtagttgttgaacaaagttgtggaatttgtttctcatagaagttcatctcctttctgttgacaaggtcattataaaatgtgaaatgaaatattacttgccaaataaatataaaaggtggacaaaatttgcaaacaagaaggaagaactgataaatatgactgatcagttcttccttttttatactttatatgtttttgcgatactcggatggggatatacctttcgttctttgaaagattcggctgaaatataaaggattatcatagcctattatctgtgcaatctctttaatgttatattgtttattttgtagtagagtttcagcattattaattcttttttgcaaaataaactgttttggcgtagttccggtatacattttgaaattgcgtatgaaccagtttgtgctgacgtggttctgtttagcataggcatcaacattaattgcttcattgtagtgttcactaaaataaacaatggctttgtctatttcttctgctatctgggatgtgtctgttataatcgtttgctcaaaatgacgctgtaatctaataaaaatctgtcttaaatacatttcgagcatttcggaataaccagttttacacatctgtaactcttttatcataaccgaaaaaagatttttatattcaggatcagaaccacaataaaagacacgcttatctttggttatgccataggaacgaagtagatttgtgacactgcttccggtaaagtgaacccaatatacttctgtgtgatctttggcataatagacatatttttgaggttctttgggccgatataaaaccatatgaccagcatgtacaattgtatcagtactatccttatcaaaataaaaatgagctttcccggaagcaacgtataataattgaaagtcaactctgccacggggtctccatgtaggaagttttggtttggtgtataacttataagttccgcacattgttacaacaagtggatttgatttatcctttctgtctatatgcgaatcattcagatatgcattgtttgtgtacattgctacctccgtatatgaaaataattagaaactgtctgaaaattaaacaaaaataatagatttagtttgattttaacacaaatttcatgataagtccatttctaatgatggataacaacgaaaaacaaaaagtaaaaaggttattttgtgtatgttttgttccatttatgatatttattttgacgtaaaatttttatataatttttgtaaaattatataaaagttgtggaaactaaagaaagttgttgaaaggagaagtttcacatggaagagaagaaataccttaaatggtataacaagataggttatggttcgggagatctggcaggaaatgttgtgtatgcattcttgtcatcattcgtaatgctgtatttgacaaatacagtaggtttaaacccgggtattatcggaacgttgatcatggtatcaaagttatttgacggaatcagcgacatgttctttggaactatgattgacaaaacaaaaagcaaactgggaaaagcaagaccgtggatgctctatgcgtatataggttgtgcggtaacaattgtagcaaactttgcaataccggacagtcttggaacaacagctcagtatgcatggttctttgttacatatacactgttaaatgcggtattctttactgcaaataatattgcatatgcatcattggttacattttgtacaaaaaacagcagagaacgtgtagagatgggatcatggcgttttatctttgcattttcaacaagcttgcttattcagtctgttacagttcagtttgtaagagtagcaggcggtggagcagctgcctggagaacagttgctgtagtatatgctatcattggagtgattgtaaatacaatttccgtattttcaatcaaggagcttccagaagaagaattaaaagcaggtaaagactacacagaagaaaagtatagtctggtagaggcagcaaaacttttattttccaataaatattatcttatgatctgtgctacttatatttgtcagcagatttattcagctatgttaaatatgggaatttattacatgatttacatactgaaaaatgaagatttatattctgtattttcatgggcaatcaatattcctgtcatcattgcaatgtgtatcacacctatgcttgtagaaaagatgaaaggtttatatagaatgaatcttgctggttatattctcggaacagcaggacgtgtcggagtgatttttgccggttatatgggcagcgttccacttatgcttgcatttacagcagttgcagcacttggaatggcaccatggcagggggatatgggagctgtaattgcaagttgttcagaatatacataccttacaaaacataaacacattgacggaacaatgtattcttgtacttcctttggtacaaaaatcggaggaggaatcggagttgctctttgtggatggttacttgatgcaagtggatttgtgaaagaagcaacaatccagcctgaatcctgcctgaacatgttgcatgttatgtatttgtggattccgatggtattgtcattgatcattacatttatcatgtcaagaatgaatgtagaagatgcgaacaaaaagcttagaaaacagttggtggagtgttaaaatggaatacaagggtatgaaagaggatgaacgtttaatttcagttacaccaagcaaaagacagattgcctatcagaatacggagtatttttgcttcatccattttacagtaaatactttcacaggaagtgagtggggattaggtgatgaaccggaatctatcttcaatcctgaagagttagatgatcgccagtgggcaaagacagctgctgaaggtggaatgaagggattaatactgacttgtaaacatcatgatggcttttgtttatggccaagcaagtatacagaacatagtatgaaaaactcaccttataagaacggaaaaggtgatattgttcgcgaaacagcagaggcatgtaaagaatatggattgaaatttggagtctatctctcaccattcttgataatagtagaacagatcagtcatcacagacactccgtattgggaagacagaccgggaatttgctttttcatgccttccttatacagcatctgaaattgaaaatgctttgcatcatgaggaattaccgccagcaagaagaactgttttatgtgtatacggagcggtaagaggagtcggaggtatcgacagctggcaaagtgatgtggaagacgaatatcatatcagtgcggaagaagacatcagatattcatttactatttgttagttgcaatgaagatacacaggatgtatcgataaatattgaactaggggagtaaaaaatatagagcagctcaagattagtgaatagtttttaatatgatgtttgtgtttgcataatttgttcttacaacaactattttcacataggaaggataaggatgctgtatcatacgatgcagtgtcctttttctaaatgggcagataaaaatgggacaatatgacaaaataaaagctaagaaaaggaggtggttctaaatgttgttagtatatgaaaatagagataaaggaatatcggtcgagtggaaaagagcagtacacatgccaccacatttacatgaagccatagagattgtatatgtgacaaatggtaatattgcacttggagtggggttagagctatatgatatgaatgaaggcgacttcgcaatcgtgtttccaaatgtaatacatcattatcaagtcttcggagaaagagaaaacaaagtcgtttttttacatattgatccggcagtactatctggatatctgaaagaattgcaaacatatagtcctgagaatccagtgctaaagaaaaaaaatatgcatccggatgtggttcacgcaatcaattttttgacaaaaaatccagagtgtaattcaatattggcgcaggcttatgcgcaaataattattgcatatgtatttactgacatgccgatgattgataaaaagttattaggaagtgatgatcttatttataattccgtggagtatgtagcaaagaattttagaaatgaaataagtctggaaaaaatggcactcgatttgggagttggtaaatatgtattgtcaagaatgtttgccaaaacctttcattgtaattttaataagtatgtgaatggagtacgattaaattatgcagttgctgcattggaaaatacacaggatactataactaatatatgttttgattgtggttttgaaagtcaaagaacctttaaccgagttttcaaggaaagatataaaatatcaccgagtgactatcggaatacatttgttaaggatatgttattgtaactgaaaaatgtaaataaagaaaaagagatgatttgacattattaaaaatgtacaagataattggatagaaaagcagattaaatgtaaaacgatagaattgttggagtagatgataaaacacaccagattgttggtgtggaaaattcactactgtattttctgtaaagtccgttgtaggtaatgcgatttctttcattcagaaacaacgcccactcttgtttccgcttcttgctcattctcggcatagcaagcaatcctcctttcctgctgaaaataaaaaccacaggaaagatacattaagccttgtttgtgtcatttctcggggcgaaaatcagggaaaatttcctttctaagcctttcaaaaaatcgcaaggtgtttgtactaacctgtggtagtgtatgaaattgtgggtttggggtaacaaaaaacaccgtatttctacggtgcgttctgtcagatatattctgttttatgatagcagaaaactggaattcacagttcttccatccttcccatcttcagcaccataacaagagttccggctgccatcacaaagacaccaatttcaatcacatagatgggaagaagcgccggacctgccacggcaaggaagtccacgataaaatgaatcccatatgcaagaaccgctgtaaaagccgctgtcttgcatttgcctgccgttaccgcccggtagatcagcagcgacaacccgatatgcagaatgatggcactgattctttcgattccgcttacaaaaaagagtggtgccggtgttgtccataggaccgacagctgtgacacggtctggtttgcagactcagcaggaagtgccgccagcgtattctgcatggctccgctgttgatcatcagcatggacacgagattgctgattccggagagtcctccgatcagaatggcctccacaccgccatgcccgattccatacatcagtgcatttggaaaatccagccatttcttcatccagaacttcatggcaatcagtcttccggtctcttcaaaaaccgctgcagccaaagccgcgtacacatagtaaagccatggcctgctctgtgcgttcagtccgcagaactgaatgacaagaacatgcagcagctgctccaacagcatggcaaacagcagataggttcctgctccgataaagaacgaggaaatccttgccttaagcttcacccttcctgcaatgaacaaagcaatcggtacccccatcgagaggacaacggagcagataactcccgctatcgccagacctgatattgtgttcaattccatctttatacctccatgattctcaaaaaattcctttattgtatttgaactgtccatacaatataaagcctaatccgacaataactgctggaagaatgatataatctataattatttcactccaaaacgaaacaataaaacctaatacaagagatattcctataatcagcgttcctgtgccgactgtttttccatactttggtatatcttcttcctttacttttcgcctgttataagagtgaattgtgctgatattgcctttgatatttacaattcccacaacagatatgaacactcccaaaatcaacattataatattttccataatgacctcctaaaaatagaatagttcctcaaattttttgtccaatgcaatacaaagaattagagccaattttgcagttggattaaactgtcctgtttcaatagaactaatggtatttcttgatacccctaccatttctgcaagctgagcttgagaaagatttgcttctgtgcgaacttcctttaagtgatttttcagttgtaattgttctttcatattctcacctctaaaagctggctaacaaatccaacaaatgcaaaaatggaaagcacaaaaaacagaacagtcaagaccaaatcgctctttcgcttcattttgataaaacgaactaaccattgtgttgcaataatgctgaagtatataacccacggactgtaaatcatagtatgagcaagcacagaagataacagcgaaagcaaacaacacactaaagcaccaactctgcttgcgtgacttccggcttgatataccacttccatttcagccaagtccttattgcgatgttcttttctgcttgcatttaagatttcgtcctttttcataaaacacctccataccaagttttctttgcatattttaattatacacatgccaagttttcttgtcaatagagttcataaaaagttacaaccgatataagagataacttttctaccacttaaagtaaatggtgggggctatgggattgttgttcatgtagatgaaaaacaaaaggaaaaaattatagatgatgtaaaagttgcggtctgtccagagtgtggtaatatagaaatgtatttagaggatttaactaatttgaaagattaagtgataacttccagatgataaagcagaagtatagggtttgattcatatgatttcagtaaaaaaacagagaattgctgctattatggttttaagttccatcatgctgattttacttttgtcgctaaattttcgactctggagtggatattatgcagaaggggatttggaaagtatagtcatacagcagatggaatgcttggaaaagtcaaatagtgaaaacgatataagcgaaagtatatgtttgcatttctatgagtgtatatgtttcggcggaatagaaataatggtgctctgggtatatgatggctttaaagacctcggacaaggtgagttttctttcagaccgggagttaccctttgcagtctatcggttcggatggatgattaaatacttctgataatcaaatttaaaatttatcatcaggaggaacttcgatgtatgtattaaatgcaaaccatatttcaaaaagttataaaactgcaggagaaactatgcggattttgcagaatgcgaatctgcaagttatgaaaggggaaatggttgctattatgggaccatccggcagtggaaagactactctgctccatgtgctgaccggggttgacacaccggacgatggagaaatcgtaataggaggagaaacgttttcacagcttacggaagaagagaaggcattttttcgcagaaagcatatgggaatgatttttcaggatttccagcttttggagagtttgacggtaaaagaaaatatattgttaccactcattcttgaacgaaaagaagcagacatccagcaagagcgtttttcaagaatagcggatgtgctcggcattgaaaaattagctgacaaaggaattacggaaatatcgggaggtcagaaacagagagttgcgattggcagggcgctgatcaatgaaccggatattatttttggagatgagccaacaggaagccttgaccgaaagatcaccggggatgtgatgcgatgtatgaaacagatgaatcaacggtctggcatcagctttctgcttgtgacacatgatgcttatacggcatccttttgtgaccgggtactttttctacaggatgggaatctggcaaaagaagtaaagaaagagaacactgccgataatttcagagaagatatatggaaaacactgtgcggtttgggaggtggaaaagatgaccttttttgatatttcccgaaagatgctgaaagctggtttttacaaatatcgattgtactttctatgcaatttatctgcaacggcattattctgttgttttgcagttatttccacaaacaggacgtttatgaatgcgtcgattgtaaattcatcaatatccaataacatttatcttccattttttctgtctgcagtgtttctggttttttttcttcctgtttcgtgtcaggcatttctggcatcaagaaaacaggaatacggcgtgatgttttctcttggcatgagccggaaggaagcgtttagaaacttactttttgaaaatgtgatcatatccgtgctggcattagcaatagcacttgcggcaggaactgtgctgtcatttttatttttttccgttatcatttatgcaatagatgttcacggagtgcaatggcagttttgcccggaagcatataagcttacagcagttctatatacagtagtggtggcagttgcctttatcctgaatgccgggagacttatgctggataaaatcggaaccctgctaaaagcacaatatcgggcagaaaaaacaggaaagatcggtacgttcttatgcagacttgcccccaactacatgaggtttcatctggcggaatggtcatttgtccgcagacacaagaaagaatggggatgtaggtatgttttagcctctctcataatagcggtatctgttatacttacgggggtatgtgtgactttatatccggcttttctacaggatgcaaaaagttattctccctatgacatggtgtactcaggaatctatggaatgaatcaggtttcagtacaggatgtccttcatatattggagaaaaatggtgttactgtagaacaggtcattcagcttccctatatcagagatgatgtttttaattaccttcctgtgacagaaataaaccgggattttggatgtgattatcagattcaggaaggcgagtttttgaatttgtttcagtacaatctggaagatgggtatgaacataacatacaaccagtatctactgtaacgatttccggggacagaaagatgcagtctgttggaacagatgtaaagatactgtttaatcaaaatccgacctttgcagataaaacactgatcatcaacgattctgatttcgaaaaattaagtgcagatataacaggtagtgctggtatcgcaaatttgtttcagtttcagaattgggaagattcttatgcgggagtatgtgaagtaaaagaatatctgcaggaaagcaatcagttaaatgaagatgagcagacatattatgaattgtcttcgaaagtggagaaataccaggatgcaaagaaatcaggacaatttttattatttttgatggcatttgtgatagggcttatgataatggctgagtttctgttaattcattcacgtatccaggcagagaaggaagaaaatagcagggtcgtttgtagtttgcgcatgttgggaatgatagacaaggaaatggtaaagtgcctatgctataagaattttctaagatttataccgccatcggttgtgggaacaatcctttctttcctgccatcttattatctgaatgagagttatggaatggggacgaatggaattctggtaggaatcgtatttggagtgattttgacagtcggaatattcgtagtgatacgcaggtattctgaaaaagaagaaaaactttatgaaagcggttttataatacaaggaagaggatttttcgagaggattttttgattatagataagtagaaaaagattcaaatcctgtgtataattaaaagataaagatagagacatcaagatttgtggcatcaaagggtgagtgtgaactctcaaaggtgtctcttgcgtttgaagatgtggaatacatacatcttaatccaccaagcccatcggatgatggtatccgaaaaaaatcataaaaacaggatgccgtatcatccaaacaaagcagaagaataaatgaaaaagtcaaagattgccatgtgtaatttctggcttttttctcgctttacaggaaattgcgccctgtaaagtaaaaaaccttccgcgggggtgccactgcgacgtataatgtagatgtcgcaagcgaccgccgcaggcgcgagaatgtgccaaggcacattctttgtttctggttaaacagccagctccattttgacggaatataaaaccgattgtagcaatctgtttttgcgggtataataaggaacaagaacagattcataggatgaaaagctgaaagggatgcacaagaatccgggcatgccttttcaaatatatgaggaattagaaatgtgtggaagatattatattgattcggatatggcagaggaaattgaaacagtagtcaggtatgtagaccaaagaatccgtaaaaagcagttttcgggtgatatccggccaacagaatttgccccggttatagaaaaatctgaaaggggcttaaaactagatgtgtgcaaatgggggtatcctttagcaaagggaaacaatcttgtcattaatgcgcggacagaatctgttatggacaaaatagtttttcgaaatgggcttctgtatcatcgcatactgatccccgcgagcggattttatgagtggaaccggttaaaggaaaagaatacatttaccaggccagatgctccggtgttatatatgacgggtttttgtgactggtttgagaatgaaaaaagatttgtgattttaacaacaaaggccaatgcctccatggaaaaaacacacgatcggatgccgttgattctggaaaaagaacagcttgcagactggttcgatgataaaaaaatggaacagctgttgcagcatacaccggtgatgttaaaacgtgaggcagagtatgagcagcaaagtctgtttttatagtatggacaaaggagaaaataatgcatatatacgtggacgcggatgcctgtccggtagtagatatcatagaagataaggcgagaaaatataaagtttctgtcacgctgttgtgtgataccaatcatgtactgtcgtctgcttacagtgaagtaatgcttgtaggagccggagcagatgctgtcgattataagctgatcagtatctgtcataaaggtgatattgttgtgtcacaggattatggtgtggcggcaatggcactgggaaagggagcctatgcgattcatcaatccggaaaatggtacacaaatgataacattgaccggatgctgatggaacggcatctgaataaaaaggcacggagaagttccaacaaagcacatctgaaaggtccgaagaaaagaacgaaggaagatgatgaaagattttccgaatcgtttgaaaaactgatccagaaggcattggcagcaagctgattcttccagatatcttttttacaaaaattggaaaggtgatacaaaaaatcccgtgacaaggaaaagtatctgcgcgaggaatattccagactgtccgaagaaaaggatcggttgtacgctaagtacggaagcctgaaaaaacgtatgcggggacaggaacaggacaaagccttgtaccttccatgacatacacacattatttttaaacaatttaatgtgtgtatgtcaacagtgaggtgagaagcatgaacgatgaacgccaagaagaaaatcgaagaactgctggaagcgtcggaggacggcacgatcaccgccgcgcaggtgacggaagccggactgcaccgcaacgttttgcaggaatttctgcttctttgctcactacaacctcctcataattaatttccaatcagctaccgtttttcgataaaacgactctaatttattttctctatatcatactgaaacagcggaaaaatattcttttccggtagataaagtgattttctggaaagtgcaggaagtatcattccacttccttaccgtcaatcagcacatgtctgatcacaccagtcacatcaaatgggttgccgtctacgataacgatatcagcatcttttccctcttcaagggagccaacgcggtctgcgataccgatatgttcagcagggttgattgttacagcacgaagagcttcgaattcatccattccggctttgattgcaaatcctgcgcagagagggagatgatggagaggagttaccggtgcatctgtgataatggaaacatgacagcctgcttttgcaagaattccgggggtctcccaggtcttattctgaagctcaaattttgtggcatgaccaaaggtaggaccaacagcaagaggaagattttcttttgcaagctcgtttgcgatcatatgtccctctgttacatgttccagagtcagtccgacaccaaactctttagcaatgcggatcgcagtaaaaatatcgtttgcctgatgtgcgtgagcctttaacggaatctggcgattcaataccggaatcagagcctctgatttctggtcgtaagatggaagtttggaaatatcgtcaccggctgcttcttttttcgccttataaagctttgcagtgtttaatgcttcacgaattttggaagcagttgtcatacggctggagattccctggttctgatagcaacgcttcggattttctccgaaggcacatttcatggcaatgggaaattttacgatcatattgtcaatacgagtaccgacaggcttgatagctgcaaaggttccgccaattgaattggaactgccaggaccggttgcaaaacaggtaacaccggcttttgcagccatattcatacagggatcaaatgggttgagtccatcaatagcctgcacttgtggagtgacagggtcattcagttcattgtagtcctgtccctcgtagccgattccatagccatcaagaccagtgtggcagtgtgcgtctatgaagccagggtacacgtgaagcccggttgcatcgattacttcagcattttcagaagagatatgctttccgatcgttacaatctttccattatcgatcagaatgtcagcgacaaaggtctcccttgttactgctgtgtgaagtgttccattcttaatacaaatcattggaaatcctccttttttaaaattataatattatcatacacgaattgtgcgaatatttcaacaaatcaagtaaggaatctccttccgctgaatttagatgaaggtaggagaagaattatgggaatcttaacgtcagtggtgggcggagagaaatcgatattccaattgacacgaggtcaaacacatccggttgtttttcggcatgtcggactccgtaaaataccgaccgtggattgaaacaaatagtatttttttatttactggtcacagagagaaatgcatcacatttcccagataataaatacaaggcgatataaagccgctaactgcttaaacgataggtggttggtggctttaatttttatgtgtgagagaaaaagtatacggttaataatagaatgcgtgagatggacatattattattgatcgatctaaacgtctatgcagatgtgccggtcgattgatattggctggatgacagttaaaacaaaagcccaaatcacataatgcaaattgaaatactgctggaaatttggtagtataagtagaacaagagcatttattgtttataatgagttagcctatatcagacaactacaataattaaggtatgataaattcatgaaaattgcaaaataacgggagctgcattgctttccaatttacgatatccggtaagaaaacatctgataaaaaggtgcatttaggaggatgatgaagatggaaatatccaaagctgattggaagttatatcgtgagcgtgtttcagactggcaggaacactatatggaacaacttaaccaagagtatgtcaacttacttatatccccgggaaatgcctctgatcacttctgggaactggaaaaaagaattaaacaggacaagaaacatcccggagttttgattgagcttcgcaaatccacagcactatgggatattgcatattttgtcaggaatcaggtaatcacactggacgatcttgagggatttagcaaagatctgatagatgcagtaaaactgattttgagccgataagaaagttatccgaccaggataaatgagaaacgaaaataaaatgtaatgacatataatagttgctaaatttccgggtaattcaaaaaacaactatgattgaaaataagaggatcgatatgtagatttgttttcagcacacaggcagccctgtaggagctaaagagaatgggtcgggaaaccgaaatcaaagtaagataacagtgtgaaacaggtggtgaaatcaggtgatcaagatacgatgcgttgtagagcgtattacttatcagaacccggaaaatgggtattctgtattgaaatgtgccgtaaaaaactataatgagctggtgacagttgtaggtaatctggtagatgtgaacgttggctcagtacttctgattgatgggaattggaaggtagatgcgaaatatggcagacagttcctggcagaaagctgggaggaaaccatgcctgccactgtttttggcattgaaaaatatcttggttccggtctgatcaaaggtgtggggcctaagtttgccaagaagattgttcaacagtttggcacggatacactggagattatcgaaaccgatgtaaagcgactcctggaagttccaggaatcggaaagaaacgtgtcgataagatcgctgagagctgggaaaggcaaaaagaaatcaagaatgtcatgctgtttttgcaggatcatggggtcagcaccgcctttgctgctaagatttatcgtcagtatggcaatgagagcatccaaaaggtgagagagaacccatttcgcctggcagatgatatcttgggtattggattcaagactgcagacagtatagccatgaagctgggaatcggaaaagaagcatttatccgactgcgaagcggtatcatgtatactttgagtgaactggcagacgaaggtcatgtttatgcggaacgtgaacagctgatcaggaaggcatcggagcttctggaggcggaggacaccagtatcattatgaccatggatcagatgctgaaagatgaggaactgatccgcgagaagatcatggttcctcagtttgcgccggatgaggttattccggaagatgcagcaaaagaggttgagagagaatgcatttatctgccgccattttattacgcagaggtgggtgttgccaataaactgaagaaactttccgaggaaccggcaggagacaggctctgggtatctttgatgagagcccgacagaaaaccggcaattcagagttgtctgttgatgtggagaagatccagaaggctgtaaatatggattatgaccaggttcaggcagaggcgatccggcgggcggccactgcgaaggttctggtactgaccggtggacctggcaccggaaagaccaccacaacccagggaattatcgctgcataccgtacttttggactgcgcatattgctggcagcgcctacgggacgggcagccaagagaatgacagaggccaccggactggaagccaggacaatccatcggctactggagtttaaaccgccggaaggatatcagaaaaatgaggagacacctttggaaggtgatgtattgatcgtggatgaatgttccatgattgatattgtgctgatgaatgcacttatgaaagccattcctccgcatatgcgtctgatctttgtaggggatattgatcagcttccatcggttggtgccggtaacgtgcttcgggatgtgatcgactctgaagtatttccggttgttcgtcttaccaggatcttccggcaggcgcagaccagcaggattatcatgaatgcccacaagatcaatgcgggagagatgccggatacttccaacggaaagagtacagactttttctttatgacgaaggaggatccggaagatgcggcaagattgatcgtagagctggtaaataagaagctcccgggatattatcggacaccagccagtcagatccaggtgctgacacctatgcagaggggtgtagtaggtgctacaaatctgaatatggcactgcaggaagctctgaatccaaagggagagggacttcgcagaagcggatttgtctaccggccaaatgacaaggttatgcaggtcaagaataattacgacaaggaagttttcaatggagatatcggtatcatagagtccgttgatttacaggatcgtacattgctggtgaattttgacggacgaagcatcgagtacgatgctaccgagttggatgaacttgtacatgcatatgcgacgactatccataaagcgcagggctcagagtatcccatcgtggtcatgccggtactgatgaaccattttgttatgctacagagaaacctgatctataccgggattaccagagcaaagcggatacttgttatggtcggaacgaagaaggcactggcttatgcagtacggaatgtaaccgtaaccaggagaaatacacttcttaaggaacgactagccggtcagattcaggtaaagaaacctgcgaagatttattatccggacttttccggtacggcagaggacgcgcggatggtcgcagagaatcggggtgactatagaaataaataaaggcggttcggctgccgtaatattaaaagaaagaagcaaacaagcgatggagaaaagaacaacgacgaaaaatagaaatggattttcaaaatatcttgtgtcgattctgctgtttttgctgtttgaagcagtagcgatcacactatggctcacaaagaacaacctgttttatctgctgaacttcagctatataggatgctgcctctcatttgggacagctctctttactgccgggaaacgctatgcccggcattttgtgcagtttgcggttgggtgctatatgctgctttacctcggcgtgttttcccgggagaatatgcagattgaggggttctggtattatctgtttctcggtacttttgaagcggcgactatccattatgcagtggcgaagatctttggtccgttactgttcggacggggctggtgcggttacgcctgctggacagccatggtgctggattttctgccatacaagcagtcgcagaagccacgaaaggaaaagctggggattctgcgttatgtgatgtttttattgtcgctggcattggtttcagcgctgtttctgatgcaggtcacgcatttggagaaaatcatgttttggatgtttcttacaggaaatgcgttttattatattgcaggtattacgcttgccttaatattcaaggataaccgtgcattctgcaaatacctgtgtcctgtcacagtatttctcaagcctatgagttatttttccctgctgcgcgttcactgcgacgaaaggaaatgcgtccactgcggtaaatgcctgcaggtatgtcctatgaacgtggaggtcaacaaagaatcccgcaagcgcaaaaacgggacttcgtgcattctctgctacgaatgcacgaagtcctgccctaaaaaagcgctgcattaaaatctgataaaaatccatgataacaacagattcaaaaaaacttaagaatatcatccacaggatattaagacgtatctgataaactcctctcgaatcataaaagaaaatttcttggaacatttttcctgtacaatccatatgcaatataaggatacaagggggcaaaagatcatgcttttcggtgctttaggattgctagagcgtgtttgaaaaacattttaagttgttcattttaaccaaattaatattgagacgatgcataagaaccctagataagtgaatgctaatttgtcataacgtgttgctatccggcgaaatgctttcaatttcagaaagtaattttcgaccagatgtctttccttataaaaccaccaatcgcagcgacgttcaaatttagctcctcggcgggatggaatggttggttcaccgccatgatcgtaaatgtaatctatcaattgattactgtcgtatccacggtctgccagaaccttgcttccatctatttcgatatgatccagtaaaggaattgcataattgatatcattacgctgcccttcactgatcataaaatacactggatagccataagaatctactattgcatggattttggtactggctcctccacggctgtgtccgatttcattcgaggccccccttttttagcacctgcgctatgttggtgagcctgaacaatggaagcgtctatagataattcttccagttcagcctctaggcttagaatgcgaaaaatattatccagaatcccgtcatcaatccatttacgaaaacgactatatacagtttgccaggaaccataacgttctggaagatctcgccagggtgcaccactgcgtgccaaccagaccatcccattaagaatgatgcggttatcttttcgtggacgtccctgttttcctgtattttcaggagggagtaatggtgcaatacggttccattcttcatctgttaactcatatcgtctcaacatactgaacacccctttttctttattttatcatgaaaaagggaaatgcaacatttggtttgtgcaatttttatttttcaaacacgctctagagcgtgtctgaaaaatcatttccgcaatctgcatgccccactttgcggtatattttaccttcgttcggttgccgtagcccgctacgcgaccctcattcggataaacgattataagtaaaagaggtctattggaaccgtgcaaacagagaaagcaacaaaaagcatttctggcggaaaaaacgtgacagaaatgcttttttgcgttgcatatcaataattgatccgttgatcaattttgattggtacggaaatatcgaaaagagcatgaaatctatatttcagacacgctctggggcgtgccaaaatctttacggaagcggatgtcctgctgccagatacagttcataccattccttacgtgtcagtgcaatatcacatgctgcaataatttctctcagacggctttcgcttgcggttcctgtgataagctgcatattcgccggatggcgtaagatccatgctgctgcaattgtagtatcactgacatgatatttctcggccagctcacgaagtttctgattcagttccgggtactcgtcacttccgagaaagcagcccttccatgcaggcatctggaagggagaccatgcctgaagggtaatgtcgtggagacggcagtagtcaagcagacttccgtcgtggtcgatagaacccgatgtttccatattgacttccatcccatttgcaaccaggttggaaaccggaatgctgaactgtacctgatttgcaaccagtggctggcggacatacttctgcaggagtgcgatctgcattggtttatggttggaaacaccaaaatggcggacttttccgctttcaaacaagacatcaaatgcggcagccacctcttccggttcaacgagtgcatccggacggtggagcagcagaagatcgaggtaatccgtccggagacgctttaaaataccatcgacagcttccagaatgtattcctttgacagatcatagcagccctggcggatgccacattttgactggagaaaaacatcctcccttttcagggacggatcgtgggaaaatgcatcaccgaacacagtttcgctcatgccgccgccatagatatccgcgtggtcaaagaaatatgctccctgctccagcgcggagtggataaaatggttcatctcttcttttgacttttcggaaagccgcatacatccgactgcaatagaaggaacctttcgcagctggttgcctaaattcgttttattcataatagaaatttctcctttgcaatgaatctgtattcgcggagtttgctgcaaagcaagcgtgggagaactccgaaagtacagaaagaataattatcacctttactatatcattaaaacgcagaactataaaccgaaatgtaagaataaaacggtaatttttttggtaagaataacagaatcagttcacctgttgaccatgttttatgttataatgtataaataaacgataaatctcaattatcaagaagaatatattatgcgatgtcgtttgtgacagctttataaaagctgtatatttgacttatgattaattacacgtgcaagaggaggaaatatgagatgattaatcaattacatttggccatgattgaattatataagggagacgcaaagcggatacaacatttctgtaaagtacacagctatgcgaagttgatagcagaaacggagaatgtagacaagaattgccagtttatcatagaagcagcagctttgacacatgatattgggattcatatctgtgaagaaaaatatggaagctgcaatggaaaattacaagaaaaagaaggtccggcaattgcagaaaagctgcttggagaattgggctttgatcgcaatgtatccgaacgggttcagtatttgattgcccatcatcatacgtatggtaatattaacgaaatggattaccagatattggtagaggctgattttctggttaatattatggaggaagggtcatcgaaagaggcagctataaaagcttatcagaatattttcaaaacgtcatgcgggaagaagatttgcagggagatgtttggtatttgacagcacattaaaggagatagattgaaaacgctgtagcagtggtgtaggaaagcggtttatcaatgggaggataaagataatgaaattagcagcagtcggaagtaattgtattgactattataataacctggatggaggtaaagcatttccagggggtggcccggtgaacatggctgtatatacggttcgccttggaggtgaggcagcatatattggcccggttggtaatgattcgtacggtgagattatgatggaggccatgaaaaagaaaggtgtgaatatttctcacttaagagtggaagagggaaagacagctgtctcacaggttgagcttgtggatggagaaagaatccttggagattatgaagaaggagtgctggaaacttacgtactcagtgatgaagatatggattttatccaaaattttgatgtagtgatctgtgacgtatggggcaaggtggaaggacagttcaaggaactgaaagagcggggtattactactgcctttgactgtgctacatatctggagagtaatgcaagcgaacaggctattccatacacggattatttattctactcaatagatgaaaatgacagttcacaattgagagaacaaatgaagaaaattcatgaaaaagggccgaaatatgtgatctgcatgatgggaactgccggaagtatgtgttatgacggaaaagattttcacagatttggaatcattccatgtgaagaagttgttgacagcatgggagccggagacagctatattgcaggctttttaaagggaatgatagagggaaaaaacattgaagaggctatgaaactgggtgcaacgaatgccacagaaacattaaaatactttggcgcctggtgattttcaaagaaaaacagaatagaatattatccgtaactgtgaaggtactgaacaattacgataattataaattaaaagatatggacaaggaggataaaaacatgaagtatgcagcaaaagcatggaaagaaacagagggtgccagtcttcgcaactttaacgaacaggcacaggttgacagtgtcaatggggcattggctttaagaccgcagattgaaacaattattgaccagatctgggaagaaggatttgatggtatttattttattggtattggaggaacttacgcatccagcatgcaggtagaagtttacatgagaggacgatcaaaacttccgatatacgttgaaaatgcagcagaatttctcacaaccggaaataaaagatttacggaaaagtctgtagttatctattcttctgtttcaggaaatactaaggaaatggttcagctggttgaccgggttcacgagatcggcgcgagagtatttgcatttattgatacaccgaatagtattcttacacaaccggacaaacaggattatctgatcctctatcctatgaacgaacagttaaaattctatatgacagcaaactatctgatgtataaaaatggtgagtttgacgaatacgatcgctacaataaagaaatggaaacttaccttgcagatgcattggttcaggttgaaaaggattcggatgaatgggcttatgaatatgcaaagaataaggtggcatttctgaaggagcataaagaccttccacattactttataggttccggcaaccagtatggcgcaacttattcttatgcaatgtgctattgggaagaacagatgtggatccgcaccaaatccatcagctgccaggaatttttccatggaatgcaggagattattgtggatgatacaccggtcaccttatttatgggagaagatgagcagagaccccttgcagaacgtgtggcaagattcctgcctcgcgtaaatggaaattatacgatcattgatacaaaagaattcgaattaaagggaatcagcccggaatacagaggaaccatctctcatcttgtgatgcacggcgtaaacaatcgtgtggatgcatacatggaactgtttttaagacatccgctttctattcggagatattatcgacagtttgaatattaagaatgatagtaactattcagtagccattatcccgcgaggtgttttggcatatttatgccaaaatcccgagacatacaagcaaaaatgccatcaccgaaggtgattttaaatgcgtttttgctcgtaactgtgaaggtactgaacagttacgaatgataattattaagaacgtaagcaaggagttgattagaatatcagcagaccacttatctaccgtataataaggaaaatagaaaatgaacgaaatattggcaaagcagttagcaattgatttttgcacggatgtaaattcaatcctgagcaaagagaatgtcttcactgagtataagcagctggtgggtcgcagaatcttcaaagaaggagaatgttattttaaggctgcgtctgtgaatggtaaaattgttgcatccgggcgaaaagatattattcaatgggcaagggaaaagttcaagacggaaaatggtgcatggtttatggatatgggatgtcttcataacttggaagacggactcctgaaatttcattgccgaatcgggcaggcgcatcccttttatattgctacgaaaaaatcggatgttgacacaaaggattatgatataaaaatattcatcggagatgaactggagcaatttcgaggggataaacgttttgaagaagcctttatttttgacggattaccaaaagatgaaataggcattggtgcgtataaggacggaaggcttttaggaatggctggggcaaccagcgacagtgataggatgtggcagatcgggattaatgtcatgcctgaggcagaaggactaggaataggcacgatgcttgttgctgccattaaaaacgagattttagacaaaaatagattgcctttttatggtacagcaatgtctcacatcgcgtcacaaagagttgccttgggagcaggatttgttcctgcatggtcagaattgtattgcaaagcaatcgaacgttaaatgcgaggttcatcgttgcaaatgatatgtcattaaaatcatacctgatcttgctattggttatatgtttcagcagaggtagatatcgtaaaaaatccagaatgaaatcagaagttactacttcgaatttcattctggatttataattgttaggtatcttcatgcatacgacttaaaacacttaatggatagtagatactgaacagttatgtggattgtatttttattacagcttcttatcaatggataaagaaagcgtcggtttcctcattttccacaacaggagtcattgggttgaactccgtttccgaaagcttctttaccagcttgtgatcaaagttgtgacggacttcgcaggtcttgtcgaaaatcatggttgcctcgtcacccggggtagatgccggccacttcgggagagatggagtttccggactgccatatcgggcaaaattgatccaggcagtggtcatgcgttcctggagacggtcggtttcacctgggacgttgcagacagccactcggtcgatgttgtggaatacgaatggaatctcagcacagtgccatgcggcttttcccccgtcaatcgggaactcataagtaaactggtaggaataggtaggtgcttcagaaaactctgatttctggcgaatgaattcgatggttgccggacgaaagaaagtgtccactgaccacaggtcggcaattgatttgtccggatatgccgtctcaaacagagagatcaactccggtgttgcatcggcatattttctcgtcagaaatgtgatcagttcctcacggttcatatcatgctttccgggcacaacgggaccaaaatcgaactcaccgatattagatcccacaatcaccggaatcgttttggcatgatctgtaaatccacatttgattggattcccgaggaaccagtcgttttccagggggccctgtccgatatagcatccctttgcagctaccttcttttccactttattataggcgtttgccagttcataataaggaatagtctccagcttttctatctcagatgcatccagcttcaactcttctaaaagggctttcacgatctcggtgccgtccccgtcctctttctgataaatacttgcctcataaacaccgctttcaatgatacccttctgaaacagaccatctgctgcaggagtattcataagggttgccactttcatgccgccaccggactgaccgaaaatcgtgacattttccgggtctccgccaaagttggcaatattgtcatggatccactgcaatgcagccaccatgtcagcgtttccggcattagcagaattcttatatttttcactgaatggagagagatccagatagccgagaatattcagacgatgattcacggaaaccacaaccacatcaccgaactcacttaagtgatcgccctcataggctacatgttcaatggatgacccggcactgaaaccgcctccgtgaagccacaccattacaggctttttcgcatccggatcaagactttgggtccagatgttcagattttgacaatgttcgttctggggccagtaacggtggggcaccagaacctccatgttaggctcatcctgctttaacaacggacatacatagccataagccaatgcgtctttgattcctgtccacggttttatcggttgaggcatctggaaacggtcagcctcagcgtaatggattccgtggaatgtatatgtggtgtttatgcggaaaccgcggatctttccaggctttgtttccactattggatctgttttactgcatacaaaataatttcccatcttggaagtaacctccttctgttacaagtagtattgcattggtgttattacgtgttgcttcatttgtcacacactttctcttaatagaatattttaccagaaatagttctacaattccatgcattatttaaaattttcgtaactgttcagtaccttcacagttacgagccaaaatgcataaaaaatcaccttcggtgatggcattttggcttgtatgtctcgggattttgacatatttatgtcaaaacacctcgcgggacagtggctactgaatagttacaaattttcactatatttctttctgaatataatgatatgtcaggccggcatatcgtttcgtaaataacagtatcctgcgtgtatggtatagttatttatgaaacgctgtactagaggtgcgaaatagtgatatactatctttggtgatatatgacatttataaaccgattgatattaaaaatgaaagatcaaaggataacgtttagattatggagggatacaaaacatgaatcttgtgaaagaagcaatagatctgggattttcaaatgctgccgttatggatacaaaaaaactggtttttgtgccggaatatcgaatcttttgtgaagaaaacaggtgcggctgttataatttaaatcctgcatgtccaccgagttgtggaacggcagaagaaatgaaacagcgcgcattccgttataagaatactttggtgctgcagaccacgttggaagatagccgggatccggctcaatataagaaagacaagcttcgacataatataatgacagaaaagcttgccggaaagatggaagcagaggggataacagatatcttgattatgactgcaggaccatataaacacaattcctgtatgtcggcatactgtgtggatgcgcagaaaatggcagatgccgcagggatgctgtgttgggagaatgatggaatgttgaggtatttctcgcagattctttattcgtaactgtgaaggtactgagtaattatgaattctattgtttggtgtcaatacagaactgctgatcgagcatgctctggtgatatttgacaggagtttgaaaaaaagagtataatacacgaaaataaaaacaaaaggggagagaagaatggattatttgtccggaattaatcaatttacacaggtggcggcacagttatctgtattactcttgattgtccgtgttgcttttggggctctgaattgttttatggggtatcggatgttgaagttctggatttcagtctgtggcttttttctgggaaccggaataggtatggccgctgtgtatattctgcagttgtccggaaatgtaaaatggattctgccactggcagcagggggcataactgcggttctgggatatgaggtgtaccttgtaggtgcattttttctgggatgggttctcacaacttatggaatattaatggtggtccgtcagctggatatagaaccaaaaatggaaatattgcttttggcagcaggaacactttttggtgttcttgtggggatcctggtagtaaaatatgcccgcccatgtattatctggctgatggctgtcagtggcggtatgagcatagcaaccggtgtctgcgggatcctgcagaaagattcagggattctgatgctgcttattatggctgtctgtgtaccggcgggagtactttttcagtttatgaccacacataagtaaaagagaggttaaaaaacacaaaagctacatatttttcatatatactgagcacataaaacgtgatagcagatcacatggttatgaggaggaacaggaatgggaaaactgaagattctggttgtggatgacgagagcagaatgcggaaactggtaaaagatttcctgatgaaaaaagattttgatgtgctggaagccggtgacggagaacaggcggtagatatattttttgaagagaaagacattgctttgattattctggatgtcatgatgccaaagatggacggatggcaggtatgtcgtgagattcgcgcacactccagggttccgatcattatgctgacagcaaaaagtgatgaacgggatgaactgatgggcttcgacctgggagtggatgagtatatttccaaacccttcagtccaaagattctggttgccagagtagaggcaatccttcgaagatccggtcacggagaacaggaagatgtgctgacatgcggaggtattgaactgaacaaaacagcacatatggtcagcgtggacggaaaaaatatcgaactgagtttcaaggaatttgaactgctgacctactttatggaaaatcagggaattgcattatccagagaaaaaatcttgaatcatgtatggaattatgattattttggagatgcccgaacgattgatacccatgtaaaaaaactgcgaagcaaaatgggagataaaggagattatatcaaaacaatctggggcatgggatataagttcgaggtagaccaatgaaaaaatcaaaatccatacgctggcagataacaggagcatttcttggctttctggtactcgctctgggattgataatttttttgaatatgacattcatggagcagtattatctggagaataaaaaagaaatattgaaaaccagttatgaaacgatagccaaagaatacgacgcggtggataagacagacacattaaagtttgcatctaccaataacctgtcgtttgttatcattgactggaatggatctgaaccggaaggttacagcaatctgcgggacagtgaatcaaaaaaacttgcagcaaaattattcggatatatttataattttgagcccaagggcgataagatcattgagaaaacaaataattatacgattcagtttaacaaagataccagtttgaacatggaatttctggaaatctggggcacgctggatgacggtgtgaattttattgtacgatcaccgatagaaagcattcagaaaagtattgcattgtccaatcgattttatctgatggtggcgttaggtgtgtgtgtgatcggtgctgcatttatcgcttttctggcaaaacgtctgacaaaaccgctgacggaacttacagagatctccagacgaatggcgaatctggactttgatgtaaaatacaccagtggcggagaagatgaaatcggtgtgctgggacataattttaatcagatgtcagaaaccctggaacagacgatttcggaactgaagacggcaaataatgaactgcagaaagacattgaaaaaaaagaagaaattgatgagatgcgaaaagaatttctgtcgaatgtttcccatgagctgaaaacgccgatcgcactgattcaggggtatgcagaaggtctccaggataatattaacgatgatgaagaaagccgtcagttctattgtgatgtgattatagatgaagcgggaaagatgaaccagatggtgaagaaactgctgacgctgaatcagctggaatttggtaatgatcaggtgaatatggaacgttttgatctgacatctctgatacagggagtgatccagtcttcccagattctggcacagcaggctgaagttgagattatgttccaccagacagaacctctgcatgtgtggggagatgaattcaaggtggaagaggtcatcacaaactatgtcaccaatgcgattcattatgctaaaaatgaaaagaaaatagatatccgatgtacccaggagaatggtgtgatccgcacctcggttttcaataccggagatgcgattccggaagaagaactgaataagatctggatcaaattttataaagtagacaaagcaaggacgagagagtacggcggaagcggtatcggtctgtccatcgtaaaagcgatcatggagtctatgaatcagcagtgtggtgtgaaaaattatgataatggagtggaattctggtttacactggatactacattgtcaggaaatcaggaataaaaactcgaaaacgtgtttttaagacaggcgtagtaacaaaagttatttatttctttgtcatttcagtgacaaatgtgttatacttaacaaagcgctgtaaaagaaaaatacgtaggaggatttttataaatgaaaatagcggtaacatatgaaaatggaaaggtatttcagcactttggaaagacagaaacatttaaagtatatgaagtggaagatggaaaagtaatttccagtgaagtgatcggttccaacggagaaggtcacggagctcttgccggagtgttagaaggtcagggagttgatgtactgatctgcggaggtcttggtggtggtgcacaggcagcactggcagaagcgggaatcgaagtatgttccggagcagaaggtgatgctgaccaggcagtggaagcatacctgaaaggagaactgatatctaccggcgtaaattgtgatcatcatcatcatgaagaagaggaaggacattcctgcggatcgaactgtggcgacggtggctgcagcggctgcggtggtggctgcggaagtcatcagccgtcatttgaaggaccaaatgtaggaaaaatctgccggacacattacaggggaacatttaacgatggttctcagttcgacagctcttatgaccgtggcgaaccactggaatttacctgcggtgccggacagatgatccttggttttgataaagcagtagcaactatggaagtgggtgagaaggttaccgttcatctgatgccggaagaagcttatggcatgtcggatccaaatgcgatttttactgtggagatcgcccagcttccaggttctgaagaccttactgtaggtcagcaggtgtatctttccaaccagtacggtcagccattcccagtaaaagtaaacgcgaaagatgaaaaaactattacatttgacgcaaaccatgagatggctggaaaagaactgaactttgagattgaactggtggaagtgaaataataacataagataagtaaaagacaaagctatacaatgatttcaatgaattgtatagctttgtttttagttgaaaatttggagggaatacagcattatgaaatacagattttggggctgggaacacgcagatgcaaaagcgattacagtcgaatataaagggatcgagacacctgttgatttatacgatgcattatcacatgtctggtgtgcggatacctgtgcgccgcggatgaggcagaactggacaaaagaaaatatgacacttggacagtgttcgatcaccgcttttctggctcaggatatcttcggcggtaaagtgtacggaatcctcagaccgggtggaaattatcactgttataatgtgatcagagactgtaagtttgatcttaccagtgagcagttcggcgatgaagtactggactatgaggagaatcctgaacagttccgggaagtgcattttgcgaaggaagagaagcggatgcggtacgagaagttgaaagaagaattgaagaagtattgcgaaagaaacgaggagaaataataaatgggacacttttactttgtccgtcacggacagaccgtgtggaatgtggaaaataagatctgcggctgcaccgacagcccactgaccgaatacggacgggaacaggcgagagaaacaggaagaaagattcttgcagaaggaatccaggcagatgagatcctgtgttcaccgctcagccgggcaaaagatacggcacagttgatttctgagatgacaggaatcccatgtcgggtagaaccgagactgatcgagcaaaatttcggaaaatgggaatctacgccgcgggatggagaggactttaaaaaggcgaaagaattcttcgcctgcagccatgagggaggagaatcgacacttcgtctggcacagagaatctataatcttctcgatgatatcaggaaagaatcgaaagaaaaaacttacattctggttgcccataacggaatcgccagagttgtgcagtcttattttaccgatatgacgaatgaagaatatgctgcatggggcgtgaaaaactgcgcggttgttcggtatgatttttagccaatatcttatattgattcggtgaaacaaatttgatttacatatagtgttaaactttatacattcaattatatcatttctactgaaatgatataattgaattgacaaatgaaaaaaatacaattcgaattttcattccggcgagaacaaataaaaccctatttatccccatgcagcagataatacagcagcccgtcacatccgcgttccacatcgacatatgtctcatcaaaccttcccgtataccacggatcccggatcgaagcggaacttccgacgaatgacagcaacaggaaaattttccagttctttcctctgatttaattggtggcagtttcttccgtgtgaagagaatccagttccagtaactgattgatcttctcgacgtagtcactgtaattaccggtttgtgccgcatattgttccatctgctgtacctgacgggtgatagcaagattgtcgcctgttagtacgtaagctttatacagagtagctgcctggtaatatctggctactgcctgacaggctttgatattggaactcaatttcttatcagggatgcagtccctgcaggtcatatcatatagattcatgtaatcttcctgttgcagggtggaaatataatcttcttcatcaagataataagaaggaacagaagcggaatctctgatctctgagattccgatggcaatcatcagaagacaggagagggtcaggataatagtgataataccacagatcagttttccaggtgaaaatcgtttcatcgtttttcaagccccctttctaggtattctttttgctttctggatgagagatccggaagtgcttccgcttcttcaggagtaagaccggcataagccaccagaatagcctttgtctgggtacgcagatctgtcagagcagcattggtttcgtctgtaaaatattcttctgcgttataagagtaattatcttcgagattataaatatcatggacatcacgcgcaagtgttgtgatggtatgagaaatctcatctgaatcgaaatagtaattattacaggaactgctggtatccacaagaattcgataaatattacgataggaatcagaggcgctgatcagggcgttgtatttgtcaaatgcatcttcataatacagagaattctggctgtaataataagaaagtccacagaaatcaccattttggatataagtatctatattttcctggtgtttgctgagatggctgtgaatctgttgcttttgaagaccggagccgatatcccagcttttggctacaaaaacaaaagaaacaatatttaataaaatcagaacgaaaatgacagtcaaaggtacagtcagactggtaaaatgtctggtcttctgataaacttcagactgagtttgctgaaattcctgctcgtatcgatccatatcttcctgatgttttctggcaaattcgtttggaaggccacagaaaggacaatatttctcctccagaccgatctgtgcgccgcaatgagggcatttcatctgttattcctccttatgaaaattgatttttatggctggctgtataatccatacattttttataactcagatacccgtcatccagacagttctgatacacctgatcagcctcatcagaagtcagatgaaaatgttccagcaacagagagtctgactcctgaataaatgtgtccaatttgacaagttctgcatccgtcagtttgtttttgtgatacgaagaaaattcttctctggtaagaaccatggcagaatagaatcctgtactgatatcgtattcattgtaactgttgtcagcgatggcatcgtttaaaaactttacatccatatataaagtgtaataattgtagtaatccatatgtttccaacgatataaagcagtgcttccatccaggttatacaaactgttaatatatgtatacacttcttcatcattcccggaagcatataactcatttaattttggaaaatactcttttgcaaatgcattttcttttcggagttctttcttttccagatagctgcttccgtaaaagacagatacccctattacgaagagcagaagaaagatacagaaaataataagaacaatcttagcagtaaaaatcccctggtggcgcagttctctggtgtattcctttgtgggaacagctttgagattttgtacatcctgtttcagatgttcgagtttttgcatgtattcagattcagcagcggcaggctgaagcataccgcagtaggggcaggtgacatcactttcttttagctcagcaccacaatttgagcaaaacataacagtacgcctcctttcattaaaagcgcaaatgcatacatacttcggacgtctcaatggtaccgggattgggaaagtatgaagtgcggatcaatattttctgactacgacactattccataattatagcataaaaaaatacaaaaagggtgttgttttttagttaattatgcattgacaaagaaaggcagagttggtagaatgaaaaacaaagctgttttacacattaccaagagaaagtgggaaagaatatgaaacagagaattttatctattttagtagataacacagccggtgttttaggaagaatcgccggtatgttcagccggagaggctacaatatagacagccttacagtaggtgtaaccgcagacccgagatattcccgtatgacggttgtctgcagcggagatgatgatgtcctcgagcagattacaaagcagctgaacaagctggtggatgttagagatatcaagattcttgaaccggatgccagtgttatcagagagttgattcttgtaaaagtgagagtatctcaggcaaacagacagaatgtcacatctatcgcagagattttccgtgcgaaggttgtagatgtgtccgtcgattccatggtattggaactgactggttcaaaatcaaaactggaggcatttctccagcttctggcagatggtaatgagattctggaattggcaagaaccggagtatccggactgtcacgtggatctgattacgtattagttttataaaaacgtgaaaccggatgaaaagcccggtcagaagatacagcgaaaagctgtcaattacatagtgtgctagaggggcaaccccctaacaatagaaaaatatccattttaggaggaacaaaaaaatggcaaacaaaatttattaccaggaagattgtaacttatctatgctggaaggacagacaattgccgttatcggttacggtagccagggacatgcacatgctctgaacgcaaaagagtctggatgtaatgttattattggtctgtatgaaggaagcaaatcctgggcaaaagcagaagctcagggattcgaagtatatacagctgcagaagcagctaaaagagctgacattatcatgatcctgatcaacgatgaactgcaggctgatatgtacaaaaaagatattgagccaaacctggaagaaggtaacatgctgatgttcgcacatggtttcaacattcatttcggatgcatcaaacctccgaagaacgttgatgtaaccatgatcgcaccaaaagcacctggacatactgtaagaagtgaatatcaggctggtaaaggtactccttgtctggtagctgtagaacaggatgctacaggaaaagctctggaaagagcactggcttatggtctggcaatcggtggagcaagagctggtcttctggagacaactttcagaacagaaacagaaacagacctgttcggtgagcaggcagttctgtgtggtggcgtttgtgccctgatgcaggcaggtttcgaaactctgtgtgaagcaggttacgatccaagaaatgcatacttcgaatgtatccatgagatgaaactgatcgtagatctgatctatcagtcaggtttcgaaggaatgagatattctatctccaatacagcagaatacggtgactacatcacaggaccgaagatcgttacagcagaaacaaagaaagctatgaaacagattctgacagatatccaggatggttcttttgcaaaagaattcctgcttgacatgtctcctgcaggtcgtcaggttcacttcaaagctatgcgtaaactggcttctgaacatccgtcagagaaagttggtaaagagatccgtaagctgtatagctggaacaacgaagatgacaaactgatcaacaactaatccaaagcactatatgtaaacacaagataaacacagaaaggggctgtcgcactaattagtgcgcagctccttttcttgtgcaaaaaaataactgccagacctcgaaagaatccggcagttggtgtaaaatcaagttatgctactaactaaattattacaaaaagattatacaaaaaattcagacggatatcaacttaaacttccgttaaatcttgaaacaatcattccggataatgattctgttcgattactaagtcagtttgtggaggctatggatttgactgacctatattctacttatgaaagaataaattctgtatcgcccagaacacttttgaagatcgtgctctattcttacatgaacggggattactcctctcgttccatggaactaaattgtaaaagagatatcaattttatgtttcttctagaaggttccccggctcctgatcatgcaacatttgcaaggtttagaagtatccattttgctccctgttctaaacgtatccttgcagaaatgtctaatgcattgtttgatatgggagaaatttccggagagaccatttttattgatggtacaaaaattgaagccagtgccaataagtatactttcgtctggaagaaggcagtaacaaaaaaccaggcaaaacttttgcagaaacttgctgattttgtggctgagtgtgagttgctttatgatataaaaatcgtttatggaaatacgataaaaataaggcatgtaaagaagctccgcaaaaaactgtatgcattaaaagaaactgaaaatatagtgtttgtgcatgggatcgggaaaagaaaaacttcactgcaaaagagtattgaaactcttgaaagttatttgaaccggctcaaaaaatataaccagcagatacatatctgtgcggaacgcaacagttattcaaagacagatcatgatgctacttttatgcgaatgaaggaggatgccatgggaaacggacagttaaagcctgcttataatcttcagcatggcgtggattctgaatacatcacatggcttaccataggtccccagcctactgataccacaacgctgataccatttttgaaagatgcacaggagcatttgaaattcaaatataaaaacataacagcagatgccggatatgaaagtgaagaaaactatctgtttctagaagcaaatggtcagctttcttatataaaacctgcgaactatgagatttccaagacccgtaaatataaaactgatatcggtaagatagaaaatatggagtatgatgtaaaaaaagatatctatacctgcaaaaatggtaaaaaattaggtgtagatcatatccgccactcaaaaagcaaaacaggatatgtaagtgaaaaaacgatttataaatgtgaggactgtaatggatgcccttacaaaagcgaatgcatcaaagggaataactgcaaaacacccttggaagaacggacaaagacacttcaggttgcgaaaacatttctaaaacatagaaaagaagatttagaccggatactctcagaagaagggatcctcttcaggacaaaccgaagcatacaggcggaaggctcctttggcgatttaaaacaggatatgcagttccgcagatatttgagcaaaggaaatgcaaatgttcttgcagaaagtacgttgcttgccatggcaagaaacataaacaaactgcataataagattcaaaatggaagaaccggaacacatttatttccgataaaaagtgcctaaattttgacttatcaaaacaatttttcaagccatcaagaatggcttattaaagtgcgtctttaataatagcctgtaacaatgaaaagcgttttttgatggattttatccttagaacagcaaaaaggaagctgccgcttcacgaaaattcattcgttaaagcgacagcccctttttgcatatgcaatatgtcgaaagaacgggcggaaaagaggcataggcaacacggagatcatgtcaatgccgtttgtgccccagcagccagcaggcatgcaataaataaacagctgtcggaatcagaacaagcagctggatatctgaataagccgcactggtgattgccggcaacaaaactgcatggagagacaggtacagatagataccacctgctgccagattgcagagaacaaatcgccatccaagaaaaccgaagactgaagcagctaccagaaggacaccaagaagaactccaccgggcagatgaaaagaaaaggtatctttgttttgtataaaaaataacaacagaattccatataaaaaaaatacaatattcatcaggctcataagtttaaacagcagactgtagtatcgtgtggtggggcagtgatcccaaagctcgacttccagtttttctgccagttctgtggctgcccgggtgaaggtgagattggtcattaccatggccttatcacagtcataaaagtttgcaccggcataggcttcctgtacagctttgtttcctaccggatatgaataatatttgcactggattccatattttttccgatgtttacgggcaataatatctacgccttgatctccggaactctgggtaacctgaactctggaaaatccattcctttttaaaatttctgcacactgatattcaaattgatacccatccatgtgttattatctcctgtaatataatatgatgtgagattcaaaagtgttttatccttaacattataatctcaggataccatagaacagagaaaagaacaagtgttcttgatggaaaataataaaatattgtgatgcggagtaactattcagtagccattatcccgcgaggtgttttggcataaatatgccaaaatcccgagacatacaagcaaaaatgccatcaccgaaggtgattttaaatgcatttttgctcgtaactgtgaaggtactgaacagttacgatgcggaatttaaactcggtttaattgattttccgaaattctgaaggtgtcattccggttgtttttcgaaacatcagaacaaaatgactggcatcggtatagcccacatcctgggagatatcctgtattttcctggttctgtgactgaccagaagttccttggctttgctgattcggaatttggtcagatattcgtagaccgaacatccaagatacctggaaaaaagccgggacagatattgtggtgtgacgaagactttctgactgagtgcgtcagcggtaagatcttccatatatctggtatggataatggtaagaaccggccgaacatatttttcccaggctggctgttgagaaggattagactgaagtcccccgataaactgcaaaagcacctgataacattccagagacaaaagttgaggatctgtcggtgtttcctgatgatgaagaacggcctgatcaatcagcttccggatggaggcagctttttcgttttcaaaaaaaagtaaatgagaagaaccaaataaggcagaaaaataagggctcatggaaccactgaaagtggcaaacaaagtaatccactgacctgaagcagaatggtaaacatgtggtatccccggagcaagaagtactccctggttttctccaatggtatattttttttcatcaatagagaggatgccgcttccttcctgggtctgcagataatgataaatcggaaaaccatccggacgtagtgtgggctcctgattccagttgttaccgatggaatcaaactgaaagggaaagtctgtgggagccgaattaaaatagataggcataggaagaacctccgtaagaattattatcgaatggtacgaaaatgaaatttcgcacagactgatgcattttcagattcatggtaacacacagaaaaaacatctgtcaatttgtttcgaaatgttatagaaagaagtatgtcttgttatacaaatctgaaaaaataagaggtataatacagataacaaatggttatcagaaacaaacaaaatagattcggataattatagaaatggacatagcgaaaggagcagttttatgcagccaaaattcaaaagaattctttatggaggagattataatccaaatcagtggccggaggaagtatggaaagaggatatgagaatcttcaaagatgcgcggatcaacagcgctacgatcaatgtattctcctgggcaaagattcagccttcagagcatgaatacaactttgcggaactggataagatcgtagagatgctttcggaagaaaattatgatattgtatttgccacttccacagcagcacttcctggatggatggtcagaaaatatccggaagtaatgagtaccgattatgaaggcagacagcatcgttttggtcagcgtcataatgcctgtccgaattctctggtatatcgcaaatatgcttctgcaatggcagataagctcgcggaacgctatgcctccaacccgcatgtgacctgctggcatatcaataacgaatacggagtgacctgcttctgcgacaactgtcagaatgctttccgtgtatggttaaaagacaaatacaaaacaatagaagcactgaacaaagcatggaacatggaattctggggacataccgtatatgactgggatgatgtggtggttccgaatgcattaagtgaaggcataggaacagagaaaaccgcatttgcgggtatttccatagattatcgaagatttaattctgacagtgttctggaatgctacaagctggagagagatgcagttcgtaaatataaccaagaagtagtcatcacaacaaacctgatgggaacgtttaaagatctggattatttcaaatgggcgaaagagatggatgtggtatcctgggataactatccggcatacgatactccatggagcatgattgccatgaaacatgatctgatgagaggcctgaaacatgaaccatttatgctgatggaacagacaccgagccagcagaactggcagaaatacaactctctgaaacgtccgggacagatgcgtgcgcagagctatcagacgatggctcatggtgcagatacgattcagttcttccagttgagaagaagtgtgggcgcctgcgagaaatttcatggagctgttattgctcatgcaggaacggaaaacaccagagtgttccgtgaggtggctcagcttggtaaagaactggaaagttttggaacaaagacactgggaagcgaaaatctttcagatgtcggcctgatttttgactgggaaaattactgggcactggaatacaccagcggaccttccgaagatctgaaatatgtagagcagattcataagtattataattatttctatgaaagaaatatcagtgttgatatgattccggtagatgcagatttctcacagtacaagatggtggttgcaccggttctttacatggtaaaagaaggaatgaaagaagctttggaatcttttgtaaagaatggcggtattctgattaccacatatatgagcggtatcgtagaccagtctgacaacgtgcatcttggaggctatccgggaccgctgcgtgacatggcgggtgtatgggtggaagaaattgatgcgctggcaccggaacaggtcaatgaagtgaaatttacggatggaactacagcatcctgcaacctgttatgtgatctgctgcatctggaaggtgcagaagcactggcaacgtaccagaaagatttttatgcagatatgcctgcagtcacaagaaatacctttggcaaaggtgcaacgtattatgtaggaacgcagatggatgatgcgggactcgcaaagattctggatcaggcggtaaatgaagtgaatgtaagagctgtgattccggaagtaaccgggctggaagttacctgtagaacttctgacgacaccagatattattatgtcatgaacttcaaagatgaggatcaggttcttccggatagccttggtggaaaaacagatttgatcagtggagcagtcattccggcaggaacggtactgaaaaaatgggatgtactgatcctgcaggaagaaaaataaaatagtactttgaaatttacgggagaatgtttcctcgtaaatccagaaagtgttgaataacgggattcgcctgttcgtgtttacggcaggcgaatcctatttgtcttggagaaaatgtaagtcccagtggaagagtgatcagatcccctcgatccagctcttcctgaacaaattcctgaatcacacaggcggcacccattccaatctttgcaaattcgatcagaagatccattgttgaaacttccagaatattggaaaactccacaccgtgttccagaaacacacgattgatatattgcctggtaatatttttttcatcgagcatcataaatgtagcggtctgaaaaagatcgccgttacctgatcgcagttccagatgttccaggtaggcggttgttgttacaaaaatatcctgaatcttttgcagtggctgaaaataaaaacctttctgtatcgccggttcgccgacaagaccaatatctattttattttcttccagtaatgtcagagtctggtaagtggactgacagctgatggatatttttacatgtgggtacgcctttataaagcgttgcagatgaggcagaaggatatatttgcaaagagtagtgctgacacctatacgaagctggtctactccaagagcatgatggcgtgccagaatctcttctccttcttcaagagtctcaaaagcatctctggtatgctggaaaaggatctccccatctgcggtaagagtaacaccccgggaacttcgtttgaacaaggttgtgttcagattgtcttccagtttttgaatggatttgctaatagcgggctggctgatatatagttctttggccgcgtgagaaatactgcccttttttgcgaccgtgtgaaatacataataaagagaaagattctgttccatgtaaaacctccgtgtatagaatatcagtgacaaatgaaataatataacctgtagttatagagaatatattttatatgtattgttattatatcgcaagatatgttacaatagcaaacagtaaatgaaaaaaatctcaatttcatgataccaggggtaaaacaggtttgccctcaacattatatacacaggaggaacagaaacatgggaatgacgatgacacagaaaattctggcagcggcagcgggtcttgagaaggtagaagcaggacagctgatcgaagcagaactggatctggtactgggaaatgatatcacctcaccggtagcaattcatgagatggataagatgacagtagatacggtatttgataaagataaagtggcactggtcatggatcactttatcccgaacaaagatatcaagtctgcacagcactgcaagtgtgtaagagaatttgcctgtaaacatgatatcactaattattttgatgtcggagaaatgggtatcgagcatgcacttctcccggaaaaaggtctgacagtagcaggcgatgtgattatcggagcagattctcatacctgtacatatggtgccctgggtgcattctctaccggtgtgggaagtacggatatggcagccggtatggcaaccggtaaagcatggtttaaagttccatctgctatcaaatttaatattgtcggaaaacctgccaaatgggtgagcggtaaagatgtgatcctgcacatcatcggcatgatcggtgtggatggggctctgtataaatctatggaattcacaggcgaaggcattaaaaatctgtccatggatgatcgttttaccattgccaacatggcaattgaagccggtggaaagaacggtatcttcccggttgatgatgtagctatgacatacatgaaagaacattccaagcgggaatggaaagtatttgaagctgacgaggatgcagtttacgataaggaatacactattgatcttagcacactgcgtccgaccatcgcgttcccacatctgccggaaaacacaaaaaccatcgatgagatcacagaaaatgtgaggatcgatcaggtagttatcggttcctgtaccaacggacgtatcgatgacctgcgtattgcggcagagatcctggcagacaacaaagtgaaaaagggtatccgctgtatcgtgattccggcaacacagaagatatatttgcaggcaatggaagaaggtctgttaaagatctttatcgaggcaggagctgtagtaagcacaccgacctgtggaccgtgtctgggtggttatatgggcattctggcagaaaatgagcgctgtgtgtccacaaccaaccgtaactttgtaggtcgtatgggacatgtggattctgaaatctatctggcaagcccggctgttgctgcagcaagtgctgttaccggtaagatttcttcaccggaagaattaggtttataggaggaagagaaggatgaaagcagaaggaagagtatttaaatatggtgacaatgtagatacagacgtaatcatccctgcacgttatctgaactcttcagatccggcagagctggctactcactgtatggaagatattgacaaagagtttgtaaataaagtacagaaaggtgacatcatcgttgccaataagaactttggatgtggttcttccagagaacatgcaccgattgcaatcaaggcagcaggtgtgagttgtgtgatcgcagaaacgttcgcacgtatcttttacagaaattctatcaatattggtcttccgattatcgagtgcccggaagcggcaaaaggaatcgacgcaggtgatgatgtggaagtggactttgacagtggtatgatctacaataaaacaaaaggaactgagttcaagggacaggcgtttccggagttcatgcagaagattatcaaagccgagggtctggtaaattatattaacgccaatacgacaaaataaatgtcaaggggcaaccacaaatatcctgaaatatgcaaaaatgtgtaatctaacacataaatcatagaaaaagacctagattagtgtaaaaatgctgatctaggtcttttttgatttcatcgacctcgaaaaagcccataaaataaggcttttttgaacgtattttccggatgaaattgtgatttcatcaggacttagacagtagtataaaatatgtattataaatattcgaggatgcgtgattttacccttttgaggataaaagggtttgccccacgacatagtatagtattgcattacatttttgggagaatgtatttggggatatataattattatatattttatatcaactcccattttatagtactttcaagtgataataggaacacttcttagattcacatatttaatacgtatttgggaacaacaatatgcaaatgggaataacattgtgtatttggggataacactatatgtatttgggagcaacaatatgtatttgggaataattttcatttttggaaaatggagataggaggaaagacatgcataaaaaagattacaaaggaagatgtgagaagaagacacttacaaaaagcaaagaaatatgtcgtacttatgatccgattcaaaataaatatgcggatatactaaatgactcaccagacattaaagaaattcgttgtaatgtcctattagacgatttccctgaaggagaatacacaagtgattttgtgtgcgttaaatcaaatggagattcaatggtgagagaatgcatacaaagagacaagatatcaaagcctatgacagtaaagcttctggatgcatcaaaagtatactggttaaaccatggcatatcagattgggggatagtaacgaatgcagaagaatgaactgtatcgcaataataattcaattattcgtgttttagaaataaaaaataatgcagttttagtaattgactgtataaataaaactatgcctcaatggataggagtctcattttttgaagactggacaaaatgctcagatgaaactcttcatgaaattactggaatagaattacaagatataaaaactgtatcgccagaagattttaaggtagctcatgaaagatatacaatgattgtaccaattataatggtacttacgaatcaagataagaagaatgaaatgatagaattaatttctacaaatgaaaaaataagtaagcaaacactgagaaaatatttatgtctttatcttatttatcaggatatatctgtgttaattccaaaaacaaaaaatgcagataaacagttatcacaggatgaaaagaatatcaggtgggcattgaataaattttatttctctttctacaaacatagtttaaaaacagcatataccatgatgctaaaatcaaaatattgcgatataaatggggaattgatttcaacatacccaacttttcatcagttacgttatttttatcgaaaatataaaacgaagcaaacatgttatatttccagaaatggtcttacaaattatcaaagaaataatcgacctttacttggggatggtgttcaagaatttgcaaaagctccaggaatgggaatgttagattctactatttgtgatatctatctaatcaacgatgcaaaagaaataatcggtcgtcccatactgacagtttgtatcgatgcatacagttccttatgttatggatatgctttaaccttagaaggaggtatgtatagcatccgacaattaatgtcaaatgtagtttctgataaacaagaatggtgcaaagaacataatatatccatcaaaaaagaagaatggaattcttcaaaatgtcctggaatattagtaacggatcaaggtacagaatatacaagttcaacatttgaacaattagcagaattaggaattaaaatagtgaatcttcccgtataccgaccagaattaaaaggaagtgtggaaaaattctttagcattattcaagatttattccgtccttaccttaaaggaaaaggtgttattaatccagatttccaagaacgtggagcgcacgattatagaaaagatgcttgcttgacattggaacaatttgagaaaatattgatccgttgcattttattttataacatgcaacgagtacttaataatttcccgtacacagatgatatgttagaaaatagaattcaaccatacgcgaataatatttttcaatacggattatcgctcgatggtgtaaatttaattgatataaataaagaacaaattgaacttacactgatgccaagaacaactggaaaatttacgagaactggactaatagtaaataatgtaagatataaaaataaaaatttttcggagcaatatctatccaacaaagaagtatctgttgcgtataatccagatgattcaggatatgtatggttaattgatatgggtgagtaaataaaattcgtattaattcaaagtcgttttcagaataaaaatttcaaagaaatagaagaaatgaaatcaataaaaaaggatattattcgatcagttgcatctgaagatttacaagcaagaataggacttggagcctacattctaacaattgcaaataactcaattagaagtaatagcaaacaacaagatattgtaaacaataaaataaaagagaaacaaagaattcataaaaattacacagaagaggtgaatactaatgaataataatttgcttgataaaataccgcctatgctttcaggagaagaattatataacagattaactgatcttccagaatatgatagaagtatacaaacaaaaaatcagactgaacgaattctgtcgctttcaacattgtatgatatatatctgccttcagaaatgtctgtagaaatttattcaaaattatatttggctcttgtgcgatccttacagaagaaatatacaaaagcagcaattcgacaatcgtatcaaaaccataatagtataattggacgagaaagccgtggaattattggcggttcagattcattttcgattattggtcgctctggaattggaaaaacatctgcaatcaatagagctatatctattgtatcaaatcatcaaattattgaatttgataaaccggcaataagaattattccatgtttaaaagtagaatgcccttgggatgcatctgtaaaatctatgctgttatcaatcttacgagaagtagatcaatatcttggaacaacttattctattaacgcatctaagaaacgaattactacagatatgcttattggtatggttgctcaagtatctatgcagcacatcggaatattaattattgatgaaattcaaaactgtgtaggatcaagaaatggaagaggattagttgcaatgcttactcaattaatcaatagttctggcatctctattggattaattggtacaccggaaacattgtcgttgtttgaatcagcctttcagctcgcgcgtcgttcattgggattgcaatataattctttgaaaaaagatagctactttaatagtttttgtaaaatactatttggatatcaatatgtaaaaaatcgtacagagataacgccacaaataattgattggttatatgaccattcagacggtattactgctgttgtggtttcgttaattcacggtgcacaagaacttgcaatatcaacaggatatgaaaaattaaatttgtattctcttaatcaagcatatgaagaaaggttgcaattacttcatgggtatatacatcctcaaactacaattagtcagcctgtaaaatttaaaagaaaacaatccataacatctaagccgaaacggacagaacactcatgtacaatatcagaacttgcaaaacaaagcaaagaagaaggtttagattttatagagttattaaaagaatattttacaatagaggaaataagagtatgaatatttttctaccagagttatatccagatgaacttgtatatagttggttcagtagattttttgtgcatgagggatatattacaaatatacatgcgttagaaaccttgttctgtaacaaacagaatgatgatccaagtaaagaatttattggaaacctcaatctaaatacaagagaatacatcaataaaacatattctataaaaaatattgttttgaatcatacaatgtatcctttgtatgccaggtttgttccattaaatcaaaaaatagaatcacttcggaaactgtgttatgaatatcataatattcaaaaaatacttccgatatccgtaagatgtgataaggaaaaatttttaaaatattgtccgatgtgcgcaaaagaagatcgtaacaaatacggagaaacatactggcatagaatacatcaagtaagaaatataatgatatgtccgaagcattattgtaaattgataaattctacagtatttatttataataaatcagaccgattgcttgtagcagcagaaaacgtgataccggataaatcaaagaatatcgaactagaaacaaacgaactacaaaaaaatttttcaaaatacagcaaagagatattttgtaaaccaatagatttagtcaacgatatttctcttcctgttatattacatcattatataaaagacacaaaatataaaaaagagaatagatatcattacacttctcagctttatgaagatatacgaaaatattacacagaaagtattcatattaatgaagtcattagcaaatgcagaattcaaaatttaatgcttggaactacatatgatttttcggcagtagttcaaatggtgttttttcttaaaataccagtaaacgaattaatttgtccacaattaacatatgaacaaatagaagaagaaaaagatttgcactataggaatataaaacctgattggatacaatatgattctcaaatggtaaaacttgtagaaaagatagcctataatacttattatggacatacaaataaagatcataaaccggagaaagttatgccaaaaagaatttgtgaaagagcatgtatacaaatacaccacataaaacatatgcctaaatgtttggctgtattagaaaaatatcaagaatcttatcaggaattatgggcaagaagattaatatggggttataacattttagagaagaataaaggtgaaggaaatttctattggagtgaactacaaaaactaagcggagttgtaaaaacaaattttgatcaaataaaaccttacttgataaattatacaaatcagcatactatcgataagattataaaagtaatgtaccctcaaaaatcgtaaaaaataggggtaataagaattaatcttactacccctaaaggttatttatcacattctcttttcggaagataatgcttttgtccattccatgtaaatttataatatgggtcgatagaatcatgcatcaaataataattgatacaatcacataaaacaatagcaatgccactcagaaaataccatacaagcgcgaattgtgggcaaattagcccttcaaacatattaaatggtaaattcctatagtcccacattctaatgcctaatatatgtaaagaaaactctcctgataataattctaaaaggagaattatgaaagtggagatcaccatttgaactggaagagggatatcccatgatattttatcattaattggatcgataagcagaaagataattcctgccacgattcccattaagacatatgaatatcctcggaatgatacttcaatcgcgatatacatgcaatatcctgttaaaaagagaataagtttattgagaaatgttttcataatttgcctcttatgagattagagaaatgaatgtattataaccagcaataccatcaacaattaagccattggctttctgatatttctttaatgcagctttacatccactaccgaaagagccaggagattctacaccgtttggatcatatcctttaagcattagtaaaatctgcaaagctgttaccatatactgagattcacctttacgaacggtatgaccttttaaagctttcttagaagcagaaccaaaagctccgtctactttaagtttagcattgtagtccagattcatagccgtttgaagaactttaatgccagcttttttagttgctgtaccacgttcgccatcacaagtaatttttgctcctgcgaaattatttgcatgagtttgaccagccttgacaattggattggtcttagatgaggaagtggaagtgcttgtagacggttttgtagttgtagaagtagtagtttttgtcttctttttgtatacagtttctagttttgctttgcttgctgatccatatttgccatctacttctaatttatatgctttctgaaaagcttttaaagcagtttgtgtacctgtaccaaaatcaccatctgctcctgatttaccacaagaatagccacatttaattagcatagtctgcattgtttttacagcactgccagagtcacctttttgtagataacttctttttgtagatggaagagtagtggaagtacttgattttccatcgccagtatatacatttccgttatcatcaatatatctaagaacacacacaagacctctgccagcgttatatctctgtgcacaataatcacgcatattctttttacttggtctaccagatccatgaccacaaattattacggaagcagcagttgatccattaatagcacgtaccatttctacatgtccaatttgcaatggtcttgatggatcagaaccttgaaacatcagacaatcaccttttcgtaatttactgacatttttaatttgtccaccgctaatcgtaatgtcttttacagtttttagcttataatacattccagctgtatttagaattccaaaaccataaccagctcgtttatatgcataagagatagaagacgagcaatcagaataatataaaccatttttatatttagtatagcaataatctcttaaattttggctataataatttcgtccaataatttcgtcatagcattttccaataacctcacgtatttcttcacctgtcattttattagcacctcctttgtctgtagtagttgttgatgtatttaaaacatatttcttaatccatttaacacaacattcatgtcttgattgaaaaattttatctccaacctgattgctattcgatgtgtctttttgatccaatatgagagaatcaaagattgtatctactgtatatggtttcttagcgcgattaaaaattcttttcgtaggtttaagaccgcctaaatgctctatttcgcagaaaagcatttgtacagctacatctttgataccgtaatcttcagcatttctaatgtatgcttttgctaattcttgaaataattggtcttgacatttttttcctgtcgcagtcgtaataatggcgaccaatgcttttttttgtgcagcagttggtcgccattttgttctttcccaatcaatttttaattttgcttcaatatttgctgaatccgcctttttaaattctgttttatttgtatcgtagatcatctgacataatttacgagctttattaccataattttgtgcccaacctaaagtacatgtcacttcagatcttgtgctattataaggtggcgcatatgctccgtatctacgatttccataaacttgtccacctgtttcaacaccaccgataatatttgttaaaatatctagttctttttgagtcataaattttctccttttgttcaaaaatgataaaattcagagttactttttgacttttaaactagatgaaatgaaataatttgataatttttatgtgttaaactccgctttaagtaatgcaacttcgtcattaaaaactgtaaataattctatctcatctattaatagttctataagtactattacgaacaaaccatattattttgcagctggtgattattattattctggtaatttttgcttttataaatatggtaatggagttattcaaataaatgcaatgaatccgacaatgaaagttaatgtagatcgtggaaagtatacactaattggatatattccaaaagaatgtgttccgggatacgaattttattttcctgttttttacaatggcactatattaggaatgcttgctttaacaacaagtggtaatatatgcttatttccatacgcagacacacaaggaaaagaaatgtgtgtaaatggatgttatgttggattttaactattaataacatatatatattataattaaagtatgaatatagggtatagcatatagtaatgcagttgcctccggcattaccggaatacagctagtaaatgctactatagcacttccatttactatttcgaatggtgtaatcgcagcatctatagactgggtataggctagtgtgggtgcaaattctctgttactgtctgcaaattcggaaacgcaaattctataaacatcaaatcacataagacctacatatacgtaaaaggaacgttagtttgatgctatcgcctgggatatctgtaaaaaccgcttatatactcttcggaagttttagaagtagcatgtgaggttatagttatagttccgttatatggaaaaaatcgaagagttaatttgtgattgtctcctgcaaccgaatatattggtgcttcaaaattatatgggggctttaagtctgtgggaaacccagaccattgataaccatcagacccaccagtgacagtcgcacctgcctttaaagttccacggtaacttagttctacttcgtaagcattgtacctgtaaactaaccatattcccaaattattttgcccaagagatatccaattactccatgttaaagcggagtataattaattcatataaggtatattctttaacaatactccgctttaacaacaattgactcaattcttgggaacaaagcagataaaaatgcattaaatgcattaagtaataatttaaattcgttatctggtactgtaaacggattaaacgcttccagttcatttagcaattatcagtatgttttcaaagacccatctggaataatgataattgctagtagtataaatacaattaatatgccagccgattctgcattgggtggatattctgcaacaagtaaatttaatgtagcgtttaatggtataccaattccaattgtatcatcacgatatggcggaggtattgatgtagtcagtgttaaatatatatcaaatacacaaataactataggctcaagagtacaaatacggaatttcttcgcagattatgtttgtataggtttatggaaataataaaattttaccattctcttattaattgaccgtctatataaaatagcatttttgatccattccatgataccccgattgtatgtccaccgtttttacaatcgtataaccactgatgtctatgatttgtatctgacttaccattaagtttagaattaatttctgattcagtataatatctatcatcatgagtatgtgatgaatttgctttattgtttaatgaattttttaatgacgttatatctgaaccattagttgttaaagcggagtataattaacaaaaatttacgcattttaaatatttatttcttttcatttcatctagttttttttgtacaacaaaaagacctgttcacataacaagtctaaaaattatttattcattttatgctaattaagcagcatatttatcatatgtattttttacgtcttttttatctacatacacataaacctgtgttgttcggatatcttcatgtccaagaatcatctgtacgttatataatgcagctcctctagcaattaattcagtagccagagtcctcctaaaacgatgtggatgtacattttttacgccagcttttttacccaatcgtttcatagccatttcaataccgtttttctgtatacgtttactaccttttcctgcgaataaagctctactttcatcttttcgtgatcgtatatatttatctaaatacattgcagcaacaggagtgaggtatacaattctttcttttccacccttcccataaacagttaattcacgtctttgaatatcaatatcgtcaatatttaatgaaactacttcagatactctacatccagttgcgtgtaaaaaatgtactaatgccaaatctcttaaatttgtacaagagctttttaaacgctccatttcttcactagaaaatggtaaacgtataattttatcgtatttaatgcttttaactgctttacaaggattatgtggaataaattcttcatcgtgcaaccacccaaagaaagaagatagcaccttacgcatattatctaaagtacgattttttactttcctttgttctttatataaagataaatataaacgaatgtcaaatgctccaacctgatataattctctgtctaactgtgaaatatatgcacttaataaatcactatatcttttaattgttttatctgattttccttcaattcgttttgtagctaaatattttcgtaataatccttcagaagtattgtctacaggtataatatctgtaatcttttcagatatgtcatatttatttaattctaataccagtgcactttgtaacatgtccatagttattccatcgatcattcctttaagttttaacgatacattgtttaaaatctcattttttaaatccatattatgattactccttttttgtattgtgttatcataatttaattctccattttataccatggaaaatattggaataaaaaattttgtatactaaactccgcttctattaaagaaactggatcatctaaaggttggatttataggaagtggtgtgatggaactgtagaactatggtggaattctaatgtaacgtattctaatttagtcggagctggtgttacaggattaactttgacatctgtagatatacctcttccgtttactataacaaatggaatggctgtggcatccgcaacgtggtacttttcagaatgggcacaagctagtattaatacaaaatcagcaacgcatgttactatacgtaaatttggaaacgaaaattctcaaaatctatcagtgcaaggagtgtatatttatgtcagaggaacaatctaattacttatataagacattaaactaattcaatcgaataacagccatattacttgcaaatcctcctgaattcatttgaaatttttcgaccgtttcgagtgcaatttgctctccttttttagctttgataactgtattaaaagtgcaagttgcatagccaccatatatgatgttcgaatcatatttgtagttgtcggaatatcgtataaggttaagccatattctacctgtattatctgatcttccacttatgctggcaacgaacaatgtagtcatgtcttctgcaaaagtaaataatccgtttttagaaaatgtgcctacagttgaggtagttacatcagtgtttgtcctgttaacacatatgaattcattagcgtaataaggcactagcgcatcagtatgaacagatatagatttatttttcttacttaaagcggagtttagtgaatccatttttgtttgtaaagtagtaccgtcagacataacgacatgatcagcagacagtaattgtttgacataaccagttgcattttttcgaaaaggttcaattttttcttttaaatctaaaattgccatattaaactttcctttctaaaaaaggagacaagaaatcagcctttcattgtctccttaaaatttattattttctatttttcttgttaaaattcacagcttatttagaagccatggcttttactttttcctctacgacttttagcagagcgtctttagatccattgattttggaaataacatctgtatattttccatcagtaatttccataccataagtaattgctttgacagaatccatatctttagcttcagcaatcatcgcatttaggatattacaatatgttgtatgataagttttattggaagagagtgccatatagatttttaaaatatcttctggctgatatgtatcacagagatgtccatctgcatgataaggaagtggaagagcgtaatcactaataataccagtgataatcagatctttgatattactctgatcctcaatagtgtaactgaaatgctgtttaccaaaagaagtatctacatcaacaccaccctcgattgcagctgtacatgcctttccaataacagctttgtaatatgttttgaattcatccagagtcatgttattggtattcacaataccaactgtagatttaacaacatctagttcttcttcaaaagaaggtttctctaagatagcagtaatcaattctactggtacatcttttgctatagtttctacaaccgcatcatgatgaattgttttctcttcatattttggttctgtatttgccgtatcaccttctacagttccatcagtagttccatctgtttcaacaggaactttaataacttcatcgtaagcttcttttacaattctttcttcatactctttaatagtggtattctcgaacagaatcgttttacgtttcatatttagtgcataattagaaatcaacttatcatcgctatcaataatatcaatagcatcaataagatccgttcctaagaaagtctttacagtttcaacatcagtattaataaattttagaatgcatgaattagtgatcacgcaatcataaatttccattttctttccgttttgtaatctaacatatttagttgtcataaggtattttcctcctgtaaaattagaaatgattaggatatattaatttgttttataattttgtagtcttaatccaaatatcgttctcagactgagttgttggctctgatgactggaataagattcgatttttaattttttcatttaaaagtttaccctgtgctgcactaagagaatcagaagtagaagtagaagttaaattgttctgaatcccacgccatgtattagtatcagtaaatacagcattagaaggtactgatttaccaagtgtatggctacaagctactggtttaccaccagaaaaatacactggctgtgttgcagaaccagccgtagatgtatcaagttttgcagcactattagcacttccaccagctgatccagaaccagcatagttgtgagtatgtgccgtaggtgtaaatgtagaaggtttgccagacacatttccccatgcaactgaacttgcactaccagcattaccagtaatgttaattccccatgtacctgatgcgccagaaccactctttgatggagcataatcattataattgtgggaatccaaaatagtacgttgcccaacccaagaattagttgatatttgtttattccaatacaaattaccgtctgatgtcagtgtgctataaatagtcattccgtatccagaaccatcaccgctaccatttctatgacgagtgctaatcatattccaccaagtactgtctttatctgtcatagaaccaagatatgttttataattattcatggcagttagcgcaatactattaatagtactaccagcataaggaatagaaccatcaatagttgcttttgtactgggcacacctacatcaccattaagtgttccgccagataaaggtaagtaactgtgcgtatgattcgtattagctttcccgcttaaagcagtatttattactttattttgaactggattagtcgaagtagaagataaagcagaatcaactgttgtcttgtttgcgcctgttgcaataccatctaattttgatttttcggaatcagttaatgaagtgtgatatgcaagagtgctccactttgaagttccgtcaccaattttatatttctgggttccggtaacaaaacccatttccccatctaacaatacaggattttttgaagtccagttagcttccgtatcatgtcgttgctgatgtttagcgttaataattatgtcagccatttatgactcctttctataatgtagtagttttataccagaaatcaccctcaatttgttcatctgcttctggttctgtctcttgcgaaagtatataagttatgcttctaattcgtaaatttacgtcatctttaaaatcagaaatcatttgatttacatctgatttaaaatcagttaatttagtattgacttccgttttataatcattaaacgaattattaattgtttgctggaaagtgttattttgagatgtaatatcagagattttttgattaattgaagatgtaaattgattatacttatcatccatagacttctgataagttttaaatttattatcaatttttgtatttacatcttttttgaattgctctttttcatttgataaatctgttttatatttttcaattgcttttagtgcattatcataagcccttaacaattgttcatatactgtatctgtaggaggtacactttcagctgttccttgtggagcaccatctacaattcgatattcaataagagcagatgtttttacttgtgtggtgtttgtatttacaccacggagtccgatatataaaattgcagaattttctaatacttcatgaggaataatacattcatcattttcaatgagttgttcaaaaactgcctttttatctacgaaaaacacaccagtttttatataaccattccattcagaattaaattccacatgtatttttacagagtttttatcacctgaagctaatttcggactttctattgctcttaaattttgatcatcagcgaataattcaatagtagtcattctccttttctcatcctcctttctttacattgaaaaaggactactcaataggagagtagtccactaaattattctgtagtttctgttttatttacaattccattttcgtccataaaaagatttccattctcatcacgaaattcacaaatatagccattttctctatcaaatcctatttttacccgaatgatttcattagaatctgtaactgttaaaaaattaccctcgatttttagggctttttcggggctgaaaatcggaaattttcccgttgaaagagtgctttcatttagattatccaatttaatatgtttggctattttatctataataaagtctaaatcaagctctgtattggtatttgtgagatgaataatatcttttacacttgcgtcaccagaaagcaatttctgaatgttactcacaagtgtttttacagttttgaaagaatcctgattatctacctcgtacaatgtactcaagaatctcataaaagcagtattaggttccaaactttctatctttccgatttcttgtgccaattgatctatagatacctgtacttcaatcataccagtaagggcatctgctaaattacgtaagtcttcatcgctcataccagatgtaataagtccattacttcctgaacctgtgatatacttcataaggatttgtgctgccattgatgagaagttattaattgcagaaatactatcagaagaagatttgctaatagaatttttgcttgacgaaccagagttgtccaataaaaaatcataatcactagattgtccatttacttttacagaatcagagaattcaaatgttaaatcattgtcattaaaatctaccaattcaatttctaatccaataatacgttgcttggttttgtatccattcattaattccaatgaaaggaaatctccaattgaaatatcattagattctttcatatattgttgcatatgaaaaatattgtctaatgtaatggaaaaagataattgtggacgagattctatatctatttccttttttgcagatttatataggtcatgtgctaaatctataatttcagaaatggtattgttatcttgaatttcaatagtagagtcagaataatcggtttcaattgtaagcatatttataagtgcaatttcttcatctgtaagattccaatcttcatatgtaatttttgcttttgctgcaagtgttttgatttttgtagatacatcgtttttctgttgataaagatcatctacttctttattaagatattctaatcgtttattgatagcatctatatatccattatattttgtatacagttcatactgcctatcatgaaaatctttactgaaatttccagtatcagcagaccaaggtttatcatatcccttttcttttaaagcatcgacctgtctttgatacgcaaccaattttgtattcagctcatttattccatataattcccagtttgtttcccaatctatctcttcagttggttcttcgccagtttctcttttttttatttctgcttcgatcttaggaataataacctctttaaaactgatatacattgaataatcagatgtattttcaatctgtaaattaccatcttgtgtatgcatttcttcaagtaaggaaactacatttctggcagaagttaattccgtgtttaattctttcaatgtcagattatcatattttacttcgacttcatctacaggttctaattcttgaataccacttattttttcacttatttccattgatttaagtgaaagattagcgtaattttctctattatcttctttccatttctcatagattttatatttatcggcagttttagctggtatcattcctgtttcgataaaataatcataatttgacaatctgactgatccgtagtttatatattcgataattgtttggtctgagtctgaccctgatacacggaaagaagtgtaaacatcatcattttgtgaatcaattataatagaattaataacatttcttaatgccaattccacgtctatatttttaccaatatgctcaatagagtaagcattaatcgtcatattttttctgtcaaaatcaaatagacatttatatgactttgatacatcttgagttaaaaaggcataaactgttttagaatctatctcaaattgtcgtcctcgttttgtagaaatatccacgtcaactgttccaattttccatccctttttatataaatgctcatgttcaagaatattaagtaatcctaatttccaatatttatcagattttggatcttcacttgcatcttcaatccacaattgtatgttgtgaattggaagaccaagagcatttagattttcctcatacatctcaattgattcatctgttccacaattaatgttgaaaagattaaggtcaatatcttgaagagttgtttcgtacccataagcagtaaattttttgtaataccgcccgttgtcatctaacaattcttgtgggtgctgattaattctaaaccatcctatcgtttctatgtcaatttccatatattgattaattttcgaaaagatgggattctcttgtatttttcctgtatcatcggtatacttagagtctacttcaaactctacttcccaaatatttcttaattgaggatggaattttgctgtttctactccaataagtgaacctatgctttttcgtccgggtcgcccaagatacatacgcaatggttctgtttgcttataagcattatatttaaatatcattaaattccaacctttcttatgtatctacatttaacaattccttttacattgcctgtaacggtaactttatttaatcctggtgcaagctttaaccatacaagatttgtgtcctttgaaaaatcaaattgatttgattcatctgtaatttttccatacttattatctatgattagcttctggttttttagcatattgagttccatgatctcatcaggaaaattattgtttaccaaagttacttttcctgtagaaagtgctgttatttcaatgatagggtagtagttctgatacttttcatcggatgaattataaattgtaaaagtggaattttcagagaaagaggtttttctttcaggactaaatccatatggggcattacattccatagaaaataataatccataaacagatgggagaggagagaattcactataagtgacggcgttacaaaaatattcaatgtcttcatgatatgggtcatcaacaatatgatccgttactgtaaataatgtcggataaataggagaagtgatccatgaaacaatttcttctctttcggtcaacgtaaattttttaccattacacttacatagaccgatatcaaactttaagacatcctcatatgatcggctatatgtattggcaacacttttatatggtgtgagatctgatcgatttatcttatatgtaattgctgtatcttttgttgtttttactgtatcaaaggtacataagacgactccataatcagaggagtttttcccgtcgtatataaaattttttccataaatactcaaattattatcacctctttctatattgtatttgatctaatattttacattttaattccaagtggataagaataaataacacgcaatctatattcttttctcataattcgtttcaacgtatcaataaatcttttcataataatcctttcatattttcttgactttccattaaagatctattacaatatataaaatttagcatacaaggagaataaataataatggaaaaacatatagaaattttttgtaatgcaaatccaataactgaatatgaatgtcctaattgcaaagcaattaataaaataagaacaaaagatcttgtaaaaataaaatacacttatacttttaactgctgtaaatgtaatgaaagcatatctattaatacaaaacaattacatgacactttaaaactacttaaaccattttcataataatcggatacgaacatagaattttcagtttctgatctgaattcagctttgcaaattcttcaatcgtggatattttcttaataaaataagaaaaatcatctttgttttctattgacacagttatagtattcatattttcatcctttcataaatacagggcggtaattacaccgcccatatataatttatccaaactatttcaaccgtccatagtgtgttttcaattcagaaagtacatcagaaacagcctgttttacgaacttattcatatcaacattcttattccaatcaccttccacattgacagcactaccaaagttaaggtttatatccccctgactcacattatttgtaatattcacaggagcagtattcgctttcacgttcttaatcatctgatccatgccagggaaaataccgttagacatgttatacaacgcctgagtctgttccttactgaagataacattaccaccccagttaccaagaatacctttctcagtaatcatggcttctgaaccaagattcagtttaccatccatatcatccatataagctaattcattcttagcttttggagtaccagtagagtagtaaagtttatacttattcagatttggagcagttgttgtccagctaggttcccagacaccatctgcatttacccaataatatttacttccatctgctgatcgcacataaccatttctagccatgacaccagtagaatctacgtaatattgagcaccattagcaccagcaacccaggtagatctcgccatagcacctgagtctgttagataataccatgcagcattacctgtagaatctgttccccatggttgccaaccagtttgcatccaaccttcccggtcaaatttataccactgtccatcaatagattcccaaccgtcatttttccaaccgccatcattatgctgataccaccaacgtccatcctgatccaaccaagtaccattctggcttttcttggtgatatatgtggattcattctttgttggaacagtagatgcctgagatggttgtgctgtagtgatcttggaagtgtcaatagaagatatgttagcattcagtttaccaatagaatcctgatattgctgtaatgcagcttgagcagattgccatggactcactaaatcctgtgttagactgaaattatactgattagacaactctgtaagaattgtatatacatcgttataattattcttcgttgcttccaaagcattagagatcgcctgattttgtttttcaagactggactctaactctttgacagtatcttcctgattctttttgaaatcctcaagggtcttatcataggcatcactgacaacacctttttcatgatctttctggtcttcatcatattgttcctgcaaatcttttaactgactttccagttttcttcgttttgcagtagcttctaatgagtcatcgccttccaaagctgctaactgagcacggactttattcatgtccttgctctggtcattcatctttttctggaaatcataatattctttctgcttatctaagtcatcttttcgcttactgattaattcatccatagcatcggtttctttttcgataccatctttgatgagatcaataattgcatcacgggcagtcttagtagcagatacagcatccatctgatctttctggtattcctgtaactgttcgttgaagtcagcctgagagatatttccctgtttataattctcttttagagcacgaattgcttcgttataatcagcgactttctgtttagcatttacaaggtcagttccaagtaaaccaagttttgtataaccagtagatgtgatcttaacatcatcatcgtagataccttcttctaagagtaaatcttggatagcagaagacatatcagactgaaaatccaacttatcaattgcttttgtaaagttattgaaccggacttccatgatagatttcttcaaatcattaagtgcttcatcagcttcaatgattgacttcttcacaccattgatttcttcttgccacttattccatgtatccgtgtacatgccaatcgtaccatcggctaccaatgcattcagctgtgcatttaattgtgcctcagaatttaccaatgcctgtctgattgctacctgtgcatttgcacttctaagtaaagcatttgcatctccaacacccgtcaatttctcagaaagatcactgacagattcattgtaatcactgatagaagtggatagactcacaagattatcataatcatccttgatgttatctaatttctggattttggtttcacggatagatttgttcaggtctgcaatctcagagttgaggtcacgggctttatcataccattccgtatatttttcgattttatcacgtacattttcatccgtgatattttcgatatccatcgtacctgtccagattttatggatataatcaccagataaaccaagtgaatttgctcttgacatatagttgttagcagaatttctaagagtattcttataggattctgagtttgcaacatattcatctatggctttattctgattgtaattcatctcaaattggtcaatagcatttttgaaactatcattccaatccttagatacatcacacagacgggaaatccagtcttgtagattttcctgtgcgtctgtgttatcttccgtggcttgagtatttgagtcggtagcttttgtgtttgcagtggtagatttgtcagatgatttggatttggacttagaagaagaacgtttctctgttgttttctgttttttatttttcttcgttgtaacagatttagggataccacctcgaatcatggcgtttccagacatcaatgcattaccggataccagagctgaagcacgagaggtaacaaaaccattttctaacagttcttctgtctgaagatgattgaatacgattgcgcctttcggaatatttgtaaattcagcaccattttcaccaaccgtatgccattttccagtgttagggtctacaacaatttctctacctagttcacctactaatgtagtgccacccgtctttgctccccatgtaccaccagcatgtgcagtaccgtttaagctatgtccaccagatttcttattatttttagatttggaaccactaccaggtacaggagaagcaatacttccactcggcaaagcaccttctgttttgattgtataagtcacatctctattgagatttggaggattataagtatcgacctgtgaatgatctaccgtatatactacttttccatctttatcttcagctgtataaccaataatagcagcatcatctacaccaagtttcaccagcgtttccggctgaataccttgtatactttgtgagatcgtatcggcacttgaagtatcaatgccaagttctgctatgattttcggattgattgactgtacctcagataccagaccatcaacttttgcctgtgcatctgttgtatcagcaccgatttctgtgagtacctgtaaatcattagcagcctgcttaaaattctgcaaggtagtaagagcctgtcctacctgtccttgcaccatgctggtatctacagacataattacaggtgcatttaactgctgaatctgttgtacgcaatattgaataactgtatttgcgtcctgaatctgtgaagtatcaacaccaggggtagctttcacatttttcatctgttcgatggtattagtaagagactctacctttttcttatcatcttcgattccagataaatccagatttacaccaagattactgaatgccgaagataaccttgctttcgtatactctgttgtaccctgaatttcatgaatctgttctgctaccttagatgcttggtctatcgcatcctcaccttcaaatgtagcaccaattttcaaattcaaatcatcttcacggacacctgatattacatcttccgcataactttgcaattcttctggactcatgacacctgtagcattgcccttaccatcggtcatgataggagtaaagttcattgcaactgtaccgtcttcattagaataagtacttgtgaagactgtagcaataccatcaccagcatcatcccaacctgctttcgttaattcttcagcatcaatgacaggacgtacttttaaatcaacgtttccaccttcgcttaattcatctagctgattttgtaaatctgctgacatcgtagaagaggtaagatcgctcaatgcatcactggcagcaacagacaaatcacctaatgattctactgcttcatcagcccatgaaaaccattgttcaccttccggctggtattcaaggatttctccgaaaacagcctgtacaaaaggcaatgccatattcattccttcagcaaagtctttcatggtcatttcaccggctaactgataattctcaccatcgtcaatcattaagcctttcttcacggcgttgctgaagaatttatccatattcacaccattgacattaccattatcatcaaaagtcatgtatttcctgatgctatccagatatttttgtactgctttttgatcggaatggtcaatagaatctggtactaaaagatctacggaagcctggtattttggattgccaactttgttgtattcgtcagaatctttatctgcaacatcacggatctgtttccatgcatttttggtatcatcaaacatgtcacctgattctgctgcattctgagcatctttccattcctgatagacaccgatagattctcttaatgatgcatttagaagatcatattgtttacactgatccacgatcgcagcatttgcggaagtaagtgcatcaatctgtgattgaatagattccgctgattcatctgctgcaagagtattattctgtagcttctgcgtcagttctgaaatttcttgggcattctttacatattcctgttgctgttgtgctttcgcaagatcattcgtagcaagctgttctttgacttttgcttccgtgattttcttcacttcttcacggttcagttgataattaccattcacatactccaatgcagatgcgtaatcatccagtgttccatcatcaaacagatctggtgatatagatgaaccggttgcctgaccgtctaccatctcattaatagaagagatagcagtttttaattttgtaactttttctgtgatggaagtaatggaattttcagattcttctgccgactttttcgcagcatcaaaagcatttttccagtcttcaatctcccatgtagaagtgtcattatctttttggatcgaatacagaatcttgaaatcatcttcagacattccttttgtgaactgttcccatgcagattcaccagctgttcttaattttcttccaagtccagcatcatcttctgtaaagttctcaagtagctgtctttttacttcatctatatcaagtccatctggatctgcaacagacataatatactgttttagtttatcttttgcatctgcttcgttgacattcaatgcatttgatagtgccgtgataagtccactgtagtttccttctgataatgctttgttaagggcatcagaaccttcttcacctgcttttaccagtgtgtccttaattccatcgaattttactttggataaaacaccttcaattgactgatcgacagatttaccagaattacttgtaaagaaatttagatattctttttgtacttcttcccatcgttttgcttcctgtgcatatcccggtagtacatttccagtgtcttgatcgtagaaagaagatgcataggactccatagtagagtacaattcttggatattatcgcggtagttatcaactactttttgctgatcttcaatatccttttgcaccttatcataattgtctgctgtctgtgatttttgtagatctttcaggtcatctgccgctttctgtgcctgttgaatacgatccagaagtgtttcatctgcggtctgccctatattttcgttcgtaccacgaatttcaccaatcaatcctgtaccgacatattttgattgtcccgtcttatcattaatccatgctgaaaaactttccagaccatcaaatagatttgtaaagaatccttctttgtttgtatcaactgcatttctcgcagaataggaattaaaagcatccttggcatctctagctgcctgatcctgttggatatccgcaagagcctgttttaattctaattgtcgttctaattcagcagattgtgattgcaaattcgataactctgcctgatcggtaaatgacagatgatcttttgcatttaattcatcaatctgattgccaactgtttccaattcactttcaatagactggatatcagattttgtttgttcgtatttttcagaagatgatacagctttatctactttttcttttgcatctgtagtcattgctgaagctacagctaagataccggtaaatgctgtaagggcagcaattattggatgtgagataattgccgttcctatacttttgaatacacctaaacttgccgactttaaatcagtaaatttattttttactttatcagttatacttatgatattttcaaactgaccagttagtttacctgctttttcttcaacatttttttcgtccacatcaaatgcttctgataaaacgcgtaattttgttcctttatctaatttaccaattgagtttaacgcttttgctgcaaaagcaatatcatcataacttttaaccgcatctactaatttattaatatctgttccagcagcaactacatttccgatttttttatatgacaagtgtttacaatattttttaaaattgctatactatttaatattaacataatttaataggagggaagatatggcattaatttcttgtcctgaatgcggacaatcagttagtacttgcgcaactatgtgtccacattgcggttttaacgtaagtgaattctataataaagaaaaacataaattggaatttaaaaaagaaaatgagcagaatatatatgatgagaactataataacttatataaagaagtatatgatagcatagaattgccacacaaaccaatcgaatctgagttcgcagtaaaatcacattttgaattttatcaaattattatcatattatttcttgtttcgattactattatttcgttcgttttatcatataccactttaataatagtaacaataattcttgatattatttatttcttttatacaacaaatttaaaaaaatcaagaaatgatttagctaaacataactatgaagttgctataaaaaaatatgaaagtataatgaaaaatccagaagaatggaagaatattgaagcgcaaaaagttatgaaccaagaaaaatcgcgtattaatagcataagtactataccgtctataaaacccgtctccaatcagcctcactgtccaacatgcggatcaccaaacatcgagaaaatatccataggcaagaagatgaagggaagtttcttctttggctttatgagtaaagatgttcggagtacgttccactgtaagaattgtggatataagtggtaggatagtaaaccactaacatcaaaatagtaggagggtagtgaaaggacataaaaaagagacatcttatggtgtctctttttgtggtgatgtatttaattaatgcgtatagtttctaataaatattataatgaaaaattaatttgtgtttattattcaatatttaattcatttagtaagtaattttttgtatcagtaatatgctgtcgaaaataattaggtttttcgctttcaaattttaaaatccttctaagcttataatttaaatctcttataagattaggattttttattataaaatgttttaaatttgatccgagatgttcttctaatatatattttgaagtaattggtattacatccgttataaaaaagatagacttatttgttgtccttccgatgtgataaaaacaacttctaatatcccttctatctctatttatataagaattaattctgtttattgccacttcgtctctatgattcacttttccgaccggaattgcccaataaagatttttattttctgaagatggaattaagcaaacaactggtcttttcttctcatcattccatttcccaccaacagatcgaataatctcttttaattcatcggttatgtaatacatcccattttgttccatattttctccttagtaaaaaaagcccatgcatttgcagcaaaggctttaaacaatgtttctttgtcgtacattgtgaaacgtgtttgaataagcaatgtttctttggcatacattgcgaaatgcaattgaataaacaatgtttctttgtcgtacattgtgaaacgtttaagagaaaccacttggttttcttgactatattatatacaaaaccaagaaaaaatactatgtaaaaatgatacaaaatagtaggtcaaatattgtgaaaaaggcagtaatactacaaaaatataacattttagatatattgagttatattattatgacttgcttacattaccaaaagtatgtactttttaatttcttaataaaaattttcaccaaatctttgaaagtccgttgttctatagttacaataggagtattaactgggaaatatttttctttcattcgtttgttttctacttcaatttgcttaaacatttttttgatatcttcttcggataatttatcagtattgctttcgattaaaacaagttcttttctactacttaaatcaatactatgataatcactcataaataaaaattcctcatttattaatacatttcgtacttctttatcatatacaattggataatattctaaatttacatcccgttgtccgcggagatgaaacatacaattgaatgatattctaaattaacgtcccgtcattcacggagacaaacatacaattggataatattcttgccgttatccacgacgtttaaagttcatttagcaatgtttgtttgttctacattgtgaaatgtaattgtttcatataaacccgtaccttctttttatggttactgatatatacggtcacagcaaataatttttcgattttttattagccaggtgacatcgggaaacccctcgcaatattttcaggttatttttagccagacactcctgaactatgtcccgaatcataataagcgacgttctggcaatgatatccaccagaaaatgctatggaagttttacgtcccccaatagggaagatgagtcgcttcgttcacttttactttagatatatgatgatatatcaaggcttttctcctattagaatgacttaatatcgtcacatactttgctttctttattgtatcttattaccacatttttagcagtagaagagtctaagacaattacttgacgaatatcattagtatgatcttctatgattcccccccatgcagatcactaactgtatacaaacatagtgtgagatgtggtgagtttgaaaagctttcatatgagttaagaaatccattgtaaattctgtcgtcagatggacgtggttcaaaacataattattgctctcaaagattacttcccatacatcgcgatattcggcatcgtgtgtgttatgaaaccgaagaaagtagtcctagagatcaaagattggttgactttctcatcagaaaggtaaactatctgccatgccatagttttccttagagagaagtttcatttataaagggacttgtggtagctaaccacaagtcttcttttgcttctgtccatcttcatttttcctttcatattaatattctccaacaacacttgtcaaagtagctaatgtatgataacaaatcataaccaaggagattattattgtagtaattatttttaatattttctttatcattagtaaccacctcattatttttgtttacaaagtgaaagagagccgtatggctctctgtttattcttcggtggtatcatttacttctgtattagcgatgatatcttttacctgttccaaatctaatcccttcgtttggatcaagttatagatgtcattcatctgttgttcttttaattctttttctaattcacgtttttgttctttctttgctttcaaagattcttctatagaagcgatttcttctgtaagcattgaaattttttcttccaatgtatagtttgttttctttcttgccataattataactcctttcatttattgactaggacttttaattgatgggtttgaacctcacaccactaaagaggcgtgattcttgggaatttcccactattgcaagaatatttaccaagctaacccgattgttccaaccgtttttaatattttctaagccacctctaataacctcaatccctcattaagaatattaatcgcggcatttacatccctatcatgatgagtattacaacaaggacacgtccattctctaactccaagattttttgtctccttattgatataaccacatacattacatgtctgagaacttgcaaagaatctatctacctttataacctgtttgttataccaattagctttatactctaactgtctgacaaattcagaccatgacacatctgcaatcgatcttgccagtttgtgatttttgatcatattttttacttgaagatcttcaatacagatcacatcattatctctaataatctctgtggataatttctgcaagaagtctcttctctgatttacaatatgttcttgaagtcttgcaaccttaattcttgctttgttacgattagaaccaccttttgattttcgagataattctatttgtaatttagcaagtttatttaaagactttctaagatatttgggattttcaatcattttcccatcagaagtaatacaaaattctttaattcctaaatcaataccaactgaattttcagtctttttcaatggttttatatctacaccagtacaacaaagtgacacaaaatatttaccacttggctcttgtgatacagtcgcattaagtattctaccttgtggtatcaacttatttctcgtttttaccattccaagtttaggtagtttgatatacttgtcacaatactgaatatttccattagtacattttgatttgtaggaatatttatgtgttttctttgatttaaatcgaggataacctgtatgttctttaaaaaatttttgataagcagaatctaaatctctaagtgaagattgcaaagcagtggaatcaacttctttaagccattttaattctgatttgagttttttcatatcatttgcacattgaacatatgaaagtgtttccttgtctttttcatacttttcaattctttttgcaagatatgtattatatacaaatctacagcatccaaatgttttcgcaataatttccttttgtatcttatttggataaatcctatacttataagctttttccactgttttcacctcactttcgttttaatactggattgaatatacgtatcctcgaccatgaattacttccatgattcatcacctctatatgtatattctctatacgtgtgggcgattcatctcaccattaaagtagcgagtgttctcgccttagtcataaagaaaatgtagcacatatacattaggttgtaaaggtatttttggtaattttttacttttttattttacacttagcacatacattatccgttttataaatatggctttacaaagcggagaggagtggtgcgcgttgaactttcttcattatttatatgcttatcccgacacaggttgccctggctttactatcggattcacatacgactgttcgtaaatgaagctggctgcttattacctattattacagacttagagttatttgttatcatatccaacaaaattatttttttatctttcgattacattctcgcccatccttagatcacgttgtagtataattttgtattaaggtttcaagcaattaatcctctttttattttttagaacctttatctcatggaattgtttatatcgccgttatgatatattcttccccatgatagacccatatacggaaatatcggaaaccgtaacagcctatggtttgtggctgatctaggttctttttaaatgacataaaacctttaagtgcggcacctgcaccgataccagcaattaaagttttgattgttccaagatgttcaattaatgtatttaaactctgtactaacccatttacaaagtcaattgcacctttatatgcatcagaactcaataaggtattagatagttcctcgaaggatgattttaaagtgtttattgaatactgaattgattgactaaatttttcttgttctgcctctgctgatccatcagaattcatagcttcgttgtatgatttcttgatagtgtctatgttactcaatgcagcagctagagcattactttggttctttccggctagagcttcaagaagtgaggcacgattaacatcagttagtttatcccattgttctccaatacctacgacaatatcatagacatctttgaattcattgtcgtttttcatgatatcaaaaccggtcattcctttgaccatatcacgaagtttagaagttgattttaccaacccatcggtatcttcgcccatatcttcaagctcggtgcttgccattctgttactttcatctatttattttagattactgaccatatacaaaatatggcgacacgttatttctagcgtgttctcacgtttcataaattaagggattatagcgtgacgatcataatttttattatgaaagaatcattacgattgatcggactgtatattatcgtttcctacaaataggagagcgagataacttaaatatatatgttaccacatatatctggcagtctcttgggatacttataattttgttttttcttaaaataccaattatatccagagctaaaatgttttccactacaaagagtttcggatatatattttattcctgtttgacgttttgcttctgcaatagaaggatattcagcaatataattatcatttaaatcacattgaattacaggagaataatcaccccttatataattgctaggataaataatttttccggattttttagcatcataaattctatgagaagaaattcctaaattattgctaatttcttttactgttaatccattatttaaaagctcttgtattctaaatatatccaattttgaatacgacaaattaacatacgatggaatttccttaagataaggaaaaaagatttgaaccatttctaaaatagaataatttctatgatcaattgcataaaaagaatattttttagattcccaaaaagtcttctttattaaatctttttctttttgttcttcaaaatcatgaaaccagctttgtatttcaattgcaatcattttttcatgatttactatatccgttggtaatgcacaatttgtttgaggatttatacatgatctttcttctacaattgtcccaggtacttcatgtaaccaaacttgtttaaggattgaagcatgtaaagactctgtttgtattccttcgcaataaggacatcgcaatcctgtcttatttgatgtcaaactattcaaatatctctttttagatatgttcttccatgtattgtgaaaaacatgtccacatttaatatgtctaaacaataatttatcagaagtatattcactagataaacattcatattgtccatttgtatattttttcagatataaattaatattataaatagaatatatattagaaaaagaaacatgcaatggtttaacattttcagaccgcattatctgatcatatacaatatcatacacgtatccattttcatcttcgcattttaattttgttaaagtaacacctttgaactcattttctgaaactaaaagataaaaaccacgttttaataaattagatcgtatttgttcaaaagacaaattacgagtatatattggtttacatttatcacattttctttttttgccatttataattttttcaaatgtagtaacaaacgtatttccacaattacatttaaaaactaaattacttttcttgtttatatattcaccagatacatatgaacaattacattctggatgcaaagttaaatagtgttttatattaaaaattacatctggattgcttttatgaaatttagaaggaaatttgtttgcattttccaacttatcgaaacaagggtatacgatatatccatctgtatcataacatttaaatttagaatttgcatttatatattcgccagatatataaataaatccataatttaagagagcttctttaaaatcatcatttgtatattttcttctatccattatattcctttaaaaaattataagtctttcctacgtctctggtgtcccttcaccctttgacatatatagttatcctctgtgttatttatttttacgccacacagcatacaaactttccttgtatggaggcacacattttacctctaaggcgcgccgatactcatttatattttgatatattcgcaacgtatatcattgtaaaaacaacttacactttcatgtaagagtagactatttcttcatctccaccattatgtgctgagagtgaccttttcgtttaaaggtatttaaccaacgccatttgcgatttgcgtcctacgagtgttgaattagatattcgagatttccactcttattttataattctctattcaaaagaaaatatttctaattcccgacatggctctagtcgttgaacgttcaccttcgacttgaccacgtatgtgaagttattttacattgtgatgatgaaaaagtatgtaatgattttaaaaacgatatggctttatggactacagatgaaccgttagacattgcaacgagttggtagaaaggaataatatatgctaattttagtaggtaaaatggggtctggaaaagacaccattaaaaatgagcttatcaaactaggtatgaaaaactgttgcacatatacaacaagacctaaacgactaggtgagttagatggtagaacgtatcattttattacagatgaagaatttgaaacaaagaaaaaagataaattcttcgtaagcacttctacttatcacacagcttttggcacatggaaatatggtacacaggtttcagaattacttaagacatccaattctattgtcattttaaatccaacagaaattaaacaaatcaaagaaaataccctattagatgaattaatgaataagaatactaagatttgctatctcattgcaggtggcaaatccatttggaaacgtctttcaaaacgaggagatgatcctgatgaggtgaaacgtagaatggaacgtgatcaagaagactttaaaaacatctctgaatatgtagatttctctatccggaatgaagacattaatccgaaatcacttgctaaaatcatctatgggatatatcaacagctatagagaagaggtgatgataagaaagtggttattagtagtggagagctagttagagaattaagaagaatggaagacacattcattttagttgaggctggtggtagagaatatatcattgacagcattgcacacagaccagtaaatcaggatagttttggtacaaaattagttctaaaatgtcatgaatcaagtgctggtgaaattaaaagataatgtcattagaagcaacatactcatcatgtaactggatatatctataaatattatgtaatgttggtaactgggaaccaatagattgcttgtgatacgggtggtttaatgcatgtttgtgtccaagattataaaattctgttccatggatacgggtcagtcgccaatagtggtatttagatttgagttcaatcaattcagatgtttgatggataatagtaaattggtatttcatagaatacctccgatatatttttctaattataacatatgtgtgtaatagctttcaataaatttactaatgataagagaataaaattatggaggtgaaatatatgaatcctattgaagtagtaattgttctgtttcttggtatcataattggttgtggtatatgtggacttgctaaatcagcttcgccgttaccttttgaagatatgatgagagatgaagaacaagaagaatttttgagaaaattaaaagacaaaaaggaggaggatgcagagtgaaagtaattaaaagagactgtacagaagttgattttgataaaaataaaatttcagtagccattctaaaagcaatgaaaaatggttccggtatcgttaaacctaaaattgcagaagatattgctaatgagatcgaagaagaatgtagaaaaaaagatgatagtatctatatttctgatattgaattgatggtctttgataagttaattaccaaaaaacaacgactcacggcaagagcatatgaaggttatagaagtactagggagtttcagagagaaaataataatacaactgatgacgatgtgattaatcttgtaaatggagacaatgattattggatgcatgaaaatgcaaataaaaatccaattttaaatacaactgtcagagattatatggctggtattgttagcaccgatgcagttagaaggtatttattaccaccagaaattgtacaagcgcatgatgaaggtattatccattttcatgatgcagattattttatgcagaaagagcataactgcgatttaatcaatctggaagatatgctacaaaacggcacagtaatttctgaaactttaatcgaaaaaccacatagtttttcaaccgcttgtactgttacaacacagattgtagcacaagttgccagctctcaatatggtggacaaagtatttctttagcacacttagcaccatttgtagatatttcgagacaaaaaattcgaaaagaagtaaaacgtgaattgtgcgatattgcaaaaaccacgcttaaaaataatgaacttgaaaatgttgttaacgaaatttcggaagatcgattgaagaaagagatcgaaaaaggaattcaaacgattcagtatcagctcgtcacactaatgacgaccaacggtcaagccccatttattacaatttttatgtatttaaacgaagcaaaaaacgaacaagaaaaattagatttagcaatgcttatagaagaaatgcttaatcaaagaatgcaaggtgtaaaaaatgaagatggtgtatatattgcaccagcttttccaaaacttatttatgtccttgagcaagataatattgtggaaaattctaaatactggtatttgacaaaacttgcagcagaatgtacgtcaaaacgacttgtcccagattatatttctgaaaaggtgatgatggaattaaaaggtgatgtatatacttgcatgggatgcagatccttccttacagtagacagattttcagataaagttggaaatatttccaatgcaaagaattttgacggttctaaacataaatattacggacgctttaatcaaggtgttgttacaatttctttgccagatatcgcattatcatctgaaggtaacatggataaattttggaaaatttttgatgaacgaactgaattatgccataaagcattacgagcaagacacgatagattgcttggaacttcttctgacgttgctccaattctctggcaatatggtgctttggcaagattaaataaacatgaaaaaatcgatagacttctgtatgatggatattcaacaatttcacttggatatgctggtttatatgagtgtgtaaaattcatgacaggtcattctcattctgatgaaggaataggagaagaattcggcttaaaagtcatgcaagcattaaatgataaatgcaatgaatggaaagaaaaagaaaatattgactatagtttgtatggaactccacttgaaagcactacgtataaattcgccaaaagtttaaaaaatcgttttggtaaagatgtgtttatcaaactggatggatcagataggaattatattactaattcatatcatattccagtatttgaaccaatcatcgcatttgaaaaacttagaattgaatctaagtttcaaaaattgagtcctggcggagcaattagttatattgaaattccaagcatgtcacataatatagaagcaatattagaagtaattaaatttatttatgaaaatattacttacgcagaaattaacacaaaaagttgttattgtgaaaaatgtggatatgatggagatattccattagttgaagataatgacggaactcttaaatgggagtgtccaaactgccacaatacagataacacaactatggatatcgcatttagagtttgtggttacattggtacggcaaaaaatggcggaaatcaaggtcgttatggtgatatccatgatagagtatatcacttagatgatatggaatatgaggatttataacatgagatatgcacaaattcgtgaattagatattagtaatggacagggagttggagtctccctgttcgttcaaggatgtgataaatatccacattgtaaaggttgctttaattctaatacatggaactttaatgacggtaaagaatttacagaagataaaaagaatgaattctttgaacttatagataaatcatatatacaacgaattagcattttaggcggagaacctttatctaaaataaattgttataatgtataccaactttgttcagaaataaaaactaaatttccatgtaaaaaaatctggatatattctggttatacttatgaaaatttttcaagagaacaattaaaggcaattttatgtgctgatgttcttgtagatggagaatatattgaagagctaaaaaatccaaatttacatttccgtggcagttcaaatcaacgagtaattgatgttcaaaaatcattaactgaaggaaaggtggtgttgttctgtgactaaagaagaagcaaatttacataaaggtgactacgtttactttgcaagaatcattccaaagcaagggatctatgatgtattagaccttaaaattcgtactgttgaagatacttattttgttgcacaggactcagataaaacttgtattgcatatccatttgcgtacaaagatgtgggcgttatcatttttaaagatagatatgatgcagttgaaacagtaaataatgcagaagttaataaaccaaaagtgagtgatgaaacatattatgaagaatattgacaaagataaaatcaaaaatatttgggataatgtcaaatgtattttctatattattctggctttaatcgctttagttcttggcttaaaactcttattcattacagggcatactaaaattttagctatgatattcacagtttatatattggcattacttacatttactgtatcaattattcgtgaaatcaaaaaggataaaagaaataaatgaaagaatataagctacagaaagacctgacgatcgcaaaattgaaagcgaataaattttcttttaaagaattaaatacatacattttaactgcacctctatatttttataagtcgtcaaaacacaaaaaatacgccacggtacaaatgttaatttgcattaatctaaatgaatcagtttacgaatttgagattattgacgagaataacaatatgtatataccatattataatagagaatatggatatagcaagttaaataaaattctggataaaaaaatcattcaggaatttaagttccttgaaaagcaaggaattatgagaaaagtaaaaggggaaaataaaacatgaaaacagttgctaaatttgaaaaagtatcatttgaacagtttaaaagagattggatggaatcatttagttcttatccagaagaggagattcagaaaatatataacagtattaagttgccaaaacgtgcgaccagtggatcagctggatatgatttttatgctccaattgatctaactctgattccaagtggtatttgtaaaatcccaacaggaattcgctgcaaaatgagtgaaggatgggtacttagcatttatcctcgcagcggattaggattcaaatatcaggctggactggcaaacaccgtggggatcatagacagtgattttgcctactcagataatgaaggacacatctttattaagatggtaaatcgtggaaatgatacatttactgtaaaagcaggagatggatttgcacagggaatcttcacagagtttggaattactgaagacgatgcagcaaatggtgtccgaaacggtggttttggaagtactaccggtaaataataaaagtatttgaattttcctaaaaaagtggtatagtataactaagattttttatactatgtcaaggggcaaccacaaatatcctgaaatatgcaaaaatgtgtaatctaacacataaatcatagaaaaagacctagattagtgtaaaaatgctgatctaggtcttttttgatttcatcgacctcgaaaaagcccataaaataaggcttttttgaacgtattttccggatgaaattgtgatttcatcaggacttagacagtagtataaaatatgtattataaatattcgaggatgcgtgattttacccttttgaggataaaagggtttgccccacgacaataaaagaaaataaatagaaatagtacaggcagtcgcagagtttcggactgcctgtattatttatgcgaacaacgagtcaaaatcacaaagcgtattttatctcgcttttgcaaaaagatagcaatcgaaattattctgttataaattatcgtgtttcggaaaaacggcagaaactgcctggaaaagaaaagtatcggggcaacaggatttgaacctgcgacctcacggcccccagccgtgcgcgctaccaagctacgccataccccgacaaaactgatttatacaagatagaaactattatatgcattataatggcttttgtcaataattatttgatttttaaaattgctttaaaaattgataaaattcattctgataaaactttatcatagaaacccgttgacaatctgtctgcttctatggtagaatttaacttgtaaatggcgtagaagaggaagagtacagaggattcggctttcagagaactgttggatggtgcgaaacagtgaatgaagaatttggaactgcccttggagctgctgtctgaacgaaatatatttccagtaggaacagacggagtaccccaccgttatcatgggggaggatataaggtgtagacccgtatctggcagagtgcatgaagctattcatgaaaaagagtggtaccgcgtaggagataatccttcgtctcttgagaagagagacggagttttttttacgcatttttacatatccataaagaagatagatgccagagatgtgcagggaatcaaatttaggaggacaagaaacatgatgaattacaaaaagtatgtgagacagtattttatgccaccggtaaaatgtatgaaatgggcagaaaaagagtatgtagagaaagccccgatctggtgcagtgtggatctgcgagacggtaaccaggcacttgtgatcccgatgagtctggaacagaaaattgagttcttcaaacttttggtaaaaatcggattcaaggaaatcgaggtaggtttcccggcagcatctgaaacagaatatgaattcttaagagccttgatcgaacagaacctgattcctgaagatgtaactattcaggtactgacacaggcaagagaacatattatccgcaagacctttgaggcggtaaaaggtgcaccgagagccatcatccatgtatataattctacatccctgagccagagagagcaggtgttccgtaaatcaaaagaagagattagaaagatcgctgtagatggagctgccctgttaaagaaactggcagatgagacagacggaaacttcctgtttgagtacagcccggaaagctttaccggaacagagccggaatatgcactggaggtgtgtaatgcagttctggatgtatggaaaccaacaccggatcagaaggcaatcattaacttgccggtaacagtagaacattccatgccgcacgtatatgcaagccaggttgagtatatgtgtgataacctgaattacagagaaaatgttattgtatctcttcacccgcataacgacaggggatgtggtgttgcagattctgagctgggacttctggcaggtgcagaccgtatcgaaggaactctgttcggaaatggtgagcgtaccggtaatgtagatatcattacgctggcgatgaatatgtatgcacagggtgtagatccggaacttgatttctctgatatgccaggcatctgtgaaaaatacgaaaaattcaccggcatgaacgtagatccgagaagtccgtacagcggatctctggtatttgccgcattttccggttcccatcaggatgcgatcgcaaaaggaatgcactggatcgaagaaaaagatccggatcactggacggttccgtatctgccgatagacccgagagatgtgggaagaagctatgatgccaatgttattcgtatcaacagccagtccggtaaaggtggcgtaggttatattctggaaacaaaatacggtctgaatctgccaccaaagatgcgtgaagctatgggttacgcagcgaaagcagtatcagatcatactcataaagaacttcatcctgatgaaatttttgaactgttcaaagaaactttcgaaaatgtcaagaaaccgctggatattcagaaagtacatttccagcagaacggacacatcaccacacaggttacatcttcctttgaaggccgtgtgatcactaccgaggcagatggtaacggacgtctggatgcggtaagtaatgcactgaaaaaagcatatgacatgcaatatacactggtttcctacaccgagcatgcactggaaatgagcacaagttcaaaggcaattgcatacgtgggtatccagaaaccggatggatccctttcctggggtgcaggcgtcgacagcgacattatccgtgcatctatcgatgccttagtcaccgctatcaacaatcgatagaaaaaaccctttatttataggctttttcgagaaaaaaacaggaaaaagtgtgtacagattcagggattaaaagtaccataaaatggtgtattttttcataaaatttcattaaaattgtgtagaaattgtgtacggaaaaatacaaagtgtgtacagaatattccatgggtaatcaaaagaaaagatggaaagaaaataaaacagagcctaggaacagagcaaagctatctagtaatagatagctttgttttcgtataaagagaaattttctaaagatcggttaaaattgttaagaagagatattggaaattcgtattttttaatactagaatatatgttcgcaatatgataaaataaaagaacatatattcgatatataaagatacattttcaaggtggtggacgacaatgaaaagagaagagaaaattgaaatgattcaggaaataattgagaaaaaagatccatacataggtctgtacgcagagttattactttcgatgggcgatatgaaactcaattacagagattatatgattacagaaccaatcaattgttctgaagaattaaaacgggtttttaatgctgattatgatttatgtgcagcattgttgactatggtattgagagaagatcatttttcatgtgggtcctttaaacaaagatttgctgctggtcaggtactactaattttaaaacgtatgagggatatcctgagcatgaaataagtaaaagaaaaattatggtaatctgtaaaataacatgacaaaacaaactataaacagaaaggatattaaatggatatactaactaatttacaagaatacggtgtgataggcgctgcttctactattgtattaatgattttaaaatataatggaaaacaaggatggaaggagagcctaggcttatctgatagagaaaaattttttcatctttggcatggatgtgtctggttatgtattatcaatactataatcgaaattttgtattggggagagagcatgggtcagcagaatgggctgacccgtaacaggtgatggcatcgaagggagacaaacagggaaggattctttcccaacatatcactttaagtaaaagtgggaaaaaaattgcaaacaataatatgattgtagtaggtgctccgggaactgggaaatcctttcggatcgttgcacccaatttactgcggaatgatgcttcagttgttgtgttggatgttaaaggggatcttttacgaaattatggaaaagccatggaaaagaatggatatcaaataaaatgtctggatgtaatcagctctgactttgggaaaagtcatatgtataatccctttgtatatgtaaaaacagaagtagatatgattcgtctggtaagcaatatacagacatctctgacaccacaggatacatccaaaggagaaccattttgggaggatggggtaacgatgtatcttttggcatgtttctattatgtatggctggagatggaggaaccaaccttgccgaaagttcaattattgatgaatgaagaaagctggatattggatgaagagacaggggaaacggaattggaaaaacgtatgaatacacttgcggtacgctcgcctatgggaaacgagcatccggcagttagtaattatagaaagttaaaggaaggtgcgccagatacagtaggatctatcattattatgtgtaattcgaagtttaaatttatgggtgtagctgcagcaaaaagattattttcggaagatgagatgaatttgtatgagcttggaatgggtgtcaacggggataaaaccacgaagacagccctttttttgtgtgtcccggatgatgacaggtcatttgattttattgttggaatgctgtatacctcactatttcaagtattaattgagtgtgcaagaaaaaatggtggtgcgttaccgattccagtagaagtctggatggatgaatttgccaacggctccagaccggaaagttttgaaaaacggattactacacctcgaagcagaaatatatctgtgattatgtttttacagtcggtcagccagctaaaacagatttataaaaacgatacatgggaaatcctgatggatgcctgctcaacgtttctctatttgggcggaggccggggagcctattccactcacaaatacattgctgatttattgggaacagcaacgattgataaaaagaatgatggtttaagtaaaggaacgagtggaagcaccagtataaactttgatcggcagagcagagaattattgaccagcgaggagatttccagaataccggatgaggactgtattattttcatttcaggtgaaaaaccgatatatgataaaaagtacaatacacaggatatgaaagagtttaaagaagtaaaaaacctgggtccttatgttccggatatttgtgttaaaaaaactgaaggtggaggatatgtcactgtgaaatcagagggtaagttgattccgctaaatgatgcggaagtagcgtattttaaagaacaggtaaaaaaaggtgaggatgtccgagtgattgatttatcagaagaaaactttatgcgaatggaatttacggacactgtttcaggaatcgatgtggatttgctgaatcagatgtcagaacaaaagaaatatgaagaagtgggtgaagtaggagatttaccggataatatttttgagtggctgggaagaaattatgataaaatcacgccagaacagagagagaagattttatggatttggaaaagaaacaagaataaggcaatgggagagatgagttgccttaaatgtagggatattgagagaacagcagtttttggctgaatgttatgtcttgaaaggctgagttgggatggagtaagtaaaacaggaatgctatgtagctgagctatgaaaacgtgctagaatagtgaatttgtatggaggttcaatagatcaagtaatagaagatatttagatattgcagtgaaaagcaattttaggcaggtataacgaaaaagttttgatcttacgatataatatgtatatcagatatgctggaatgagtatctaaacgatttgaaaaatagaccaaaagagtgaagaaagcgaatgatagggggtagacaatagcataacacaaaggttataattgaaaaaacacataaaaaataatacaaaataccgttataaatatggtagatgcagagtgggaacagaaagttttattttaaggatgttaatcatattatacgaggagggaaatagcgtgagataagaggataagtttatacttgaattgcttatgccaaacactgattttggcagtaatgaaaaattgaataacactttggattgggattacattatccatcactgcacacaacacaagttattacctgtactttataacagaatcaggaatatattacagataccccagcatattatgcgaattcttgataatgagtataaaataaggaaacatatatattctaaacaaagagatgaatttttacaccttttgaacgaattggacaaggctggcttgaaagtaattttgctcaaaggggtatacttggcagaaaaatgttatagcgatcctttagaacgtccgtatctggatatggatatccttattcaaaaaaatgaaacagagtatgttttccgaattatgaagaatcttggctatgttcagggagaatataacagaaacacacacgccatagatgaatttgataataacagattaaatggatatgaatctgaacttcaacactatggtgaatttgttaagttaagtggttctgattttttctccgtttattctgttgatgtgcaccacagacttagtacaatttttgacagtttttattatgattctaatttactttttcaacgggcaaaaaaggagaatattcaaggaatacatttttggcgattaagtagtgaggactttttacttcatctgtcatctcatttgtattggcatacactatctttaagagatataatatctggatgtgacattcgtttgttatcatatttcgatattgcactttttatttcaaataacgaaattaattggaaaaagttatttgaatatgctagagaaactaaattagaaaatgcattatactatactttgtatcattgccagcttatatttggaaatattattccgaatgatatatatgtaacatgggatatgcaaaaggtaaaggaaattagcaatacaatttatgacagatggtttaaccgggccacccttactcctgtgggaaaatggacaactgacttcatggaaagagtttttgatgatgatagaaagaatgaagcattactttctttttataatgattatattaacaaagtgttattctctggtagctattttaaagttatagatatttctgtagaagacagatttgatgaggaataatcatgatagaagtaaatcatttagtaaaagagtttaagatacctatgcagaaaaagggtaggtttgccactgttagaaatctgttctctggtgaacatactatcaaacgtgcggttgatgatattacattttcagttgacgatggagaaatagtgggttttatcgggaaaaatggtgctggaaaatccaccacgattaaaatgctttccggaattttgcagcctacctcaggaaacgtcacagttggtggtatcaaaccttttgaacagcgaatggagaatgctaagcagattggtgtcgtatttggtcaaaaaacacaactttggtgggatgtccctctgattgaaagttatcgcctgttgagggaaatttacaaaatcgacaatggtacataccataagaatcttgagcgttatattcccatgttggggcttgaggaggttatcaacaagccggtgcggcagatgagcctggggcagcgagtgaagtcggatatctgtgcggcgctgcttcatgatcctaaaattctttttttggatgagccaacgattggtgttgatgttgtttcaaagaaatatctccatgactttatttcggaaatcaatcgtgagaaaggtactacagttttacttactactcatgatatgggagatatagaaaagctttgttctcgcgtagtggtgattgattccggtcacctgatgtatgatggggatttagagagtatggtgcaaaagtttggcgttatccgttcactgatgatagagtttgaggagcctgttgcggactttcaggtaaagaacgcgaagctgaccaaaagcgagggaaatcgtaagtggttctcatttcatcgatcagaagccaccccaattggactgatacgttctatcggtgataaataccctgttcacgatattgaaatcatcgagcctgatattgaggagattgtgaggaagctttatgagagtaagtaatggggttagtatgcggacgggcatggcgtttttgcgtaatgagttttataatatgagcatatacagggtttctttctggcttaacttcatatatacattccttatgatgtacagtgttggttatgtgtggcgtgcgttgtatgccgcaaatcccagtgttaccggtgtaccgcttccacagatgatttcctatgctgtactgggtgttgcattagaggcaatcctgcatccacgaaatggtccacagatttatattatggagcaagttcgcaaaggtaccattgaaatggatattatgaaacctattgattttcagttctacatgtttgcaaagaatatgggaagtattgcagtacggttcctgtttttagtgtcaccctcattgatcgctgcgtttttcttgttttcgttagaattgccgaaatggcctgcatttttttgcttcatttgtagtctgatttgttcagttatcgtgagtttctttctgaactttatccttggacttttgagtatagtaactatgaatatccgtaacatcaactgggggtataacgcgttgcttcgtttcttttccggacagatggtaccgttgtggatttttcccggagtgcttggcatcataagtgatttcctgccatttcgttgtatttatgccattcccatgtccatctatattggaaattatgcgggtatggatatgctagtggctctggctgtgcagtttacgtggatatttgtactctggctgacatcccgtctgttgatgaagcaggtatttgccagagtgatgatacagggggggtgagaatatgcggaacatccgattatatggccagtttttgcgcgtggctattctggggaaaacacaatataaggctgatttttttgtggggataataagtgttttgattctgaatgccgtaaatctctctcttataggtattttggtatataatttcaacactctgggaaattggaacatatgggacttactgttcctgtatagtttctggatgttgagccgtgggatatacggcgtgtttttctggcatttatctgatctggaggaaatgatcgtaggcggtacgtttgatgcctatttgatccgtcctgtcagcccatttctgcaatttatcggtaaagatatcagttatacaggcgtaggagattttctggtaggggtattagggttcatccttgccgctgctcaaatcggaatacactggaatatggggcagtgggcatattttttgatttgcgtgctgtcaggagctttgatacaggtggctatcaacctgattggcgccagtctttgtttttggacaacacgttctaatgcagccatgaatatagcggaaagatttacagtgttgatgcagcagtatccggtgaatatttttggaaaatattttcagatatttgttacttgttttttgccagtggcttttattaattattatcccagtgttgtgctgttaggtaaggcggcaggggggattaagatgtggcaatattttgcgcctttcgttgcgattgtcatgctgggaatagcggcagctgtctggacaaagggcttgaaaagatatacagggacagggaattagtcattatgataacagagaagaaagtgccaaatattcaatgaaattgaatatttggcacttttgggtaaatctgaaatattatgtagcagacaaggtagataaagaattcatgctgtatgtcagagtaaagaagatagataccattgtttcctgtacgaaatactgagtaaatttgaagggaacctgtatagaaaaatgtgattgcaaaaatccagtggaggggttggtggtttaaaatagagtacgattctggaaatattctgagcaaactattaggctgaaaagctttttgtttggcgatttggtaaatcccaataaattaattttataggaaacagaaaatttgaatttttggaggtaatgaccatgaagaaaatactaatattgttgctatgtcttttacttacggcctcaatcacgggttgtggtacacagtcaataaagccgattgacacaattgaaggaaacatgaaaacatacagtgaaatgtcagacggtacatggcagtgcgatggacatatctacaaatacaggttggaaatcagtggacgactgagtaatgccgttaaggacagcacatacatttatttaagcaacatagaagatattaccttcgaacaagcttggaaagcatctgggcttagcagtaatatggatgattactttgatattgacgaagcagtattggttgaattaccagactgacaacttcccgttttattgggaagtcgcagagaacgaaaaatcggaagtttacagcgaggtgaaagaggttgaattatgtagaatatggaaaagaaaacagcgatataattatcctcttacacggaggcggtttatcatggtggaattacaaagaggttgcatgcaataatgcttattgcattaacgaaaagaaagctataaaactgcttgaaacttttgaatataaacctaaaaaatatgccgaaagggtaaatcatatttttgaagtactcggtctttcactttttgaatgctacgatatgaccgagaagctttataaagaagtgagaaaattgcaacggagataaataactttttaaacgagggggaattcagatgaaagaaaacaaatatgatgataatatattttttcaaaaatacagtcaaatgagtcgctcacagcagggactagccggtgcaggagaatgggaaacattgagaaagctgctgccggattttaaagataagcgtgtgcttgatttaggatgcggctatggatggcactgtatttatgcgatggaacacggagcgtcttctgttgtaggtgttgatatttctcataaaatgctcgaggtagccaaagaaaaaacacattttccacaggttgaatataaatgctgtgctatagaagatgtggaattcccagaggagagttttgatgtaatattaagttcacttgcgtttcactatgtaacagattatgagattttagtaaaaaagatatatagaataatgaagtctggtggtaagctagtttttacggttgaacatcctgtttttactgcctatggaacacaagactggcattataacgaaaaaggagaaatactgcattttccggtggataattattattatgagggcaaacggacagctgtgtttttgggagaaaaggttacaaaatatcatagaacactgaccacatatctaaatacactgctttcaaatggttttataataaatcatattgtggagccgcagccgccggaatacatgatggatattccggggatgcaggatgaaatgcgccgtcccatgatgctgattgtatcggcgaacaaaaaagcggatagatagaactaaaatacctataaggtataaatggaggtaatttatgtttaaagaaaaaattattatagagatgaaagaagtattcaaagaaattccttttggcatagagcatactctcaaagttttgaaaaatgcagaagatataatgaaaggagaaaatatcggagaggaagaaaaagaattcatcagtattattgctatactacatgatattggtgcggttgaagcacaaaaaaaatacggttctattgatggtgtctatcaagaaaaggaaggaccagaagtagcgaaagaaatattaaaaaaggtaggctataacaaaaatattgatagaatatgctttataataggcaaccatcatactccatctaaaattgatggacttgattttcaaatacaatgggaagctgatttgcttgaaaatttaacggttatggataaagaaaaagaacaggaaaagataaaaaagtgtatagatgaaaactttaaaacaaacacaggaaaaaggatagcttataatcgctttattttagattagtagtagattattacagttatgtattttatatcgcaaagaaaaaatagtagttaagtttaaccctagataataagcagcaaaggagtgcgataagatgatatctaataatacctccaggcctacaacggatgatgagttgcaaaagaatacggttggttgttaaggattctgctgatgagtcatcctacgttccagtgttggaagcggccggatatgtgctacagattcgagaacctgactggtttgagcatcgtttgtttaaaggaccggataccgatattaatctgcatgtgttcagtttgggcacatcagagattgatagaatgttacgcttccgtgattggttgcggactaatgatgctgatcgggacaaatatgcacaagtcaaacgaagcttggcaaagaataaatggaggcatgtccagcactatgcgaatgctaaaacatcaatagtacaggaaatcatgaaaagagcgaatagtaataatgcttaaggagagtgtcatgttttcttggtttgttataggaggttatatcaatgaaaaatacagtagataatttgtcgaaaagtaaagttattttaatgtgcggccctgcgggagcaggtaaatcaacactaacaaaaaaatttgaaagtactgggatgacaatactatcttatgatgaagaatcattcaaacgaggttttaatgaacatcctttacctcaggaggttttagaagatattaaaacctatcttgatgaaaaactaatttcacttatcatgcaaaacattgatattgttctcgattattcattttggtctagagaaatgagaaatgaatatatttcattattaaagaaatacgacatagaacccaaaatctattatataaagacacctaaggaagtgtgtatggaacgtattcgaaaaagaaacggaaatcaccaaaatgatatcatattgacggagcaaacagcttccacttattatgatcattttcaacccccaactgatgaagaaggtgaagttatagtagtcgagggatattaatattgtggttttaggcatggaaattgtgctagatgataagttttgtcaaattttttgaaagatatacttccaacaaggggataccagcttcaggtgatgtcattattgtcatctcagagcagggggtagtattgattcagacggaagaataagtggcgatgcaatgaagacgatgaatgcattattgaaattacaggaaaaaaaacttactgaaatacgttatgtttattcttttgacaactctactcaatcatgattatgcaattagacacgttattttttatcatgaatggatatgttcccgagaacgaacgagagcaggtaacatcaatgctgtttcctcgacccaaacggttactatgtcattgggaccgatttttataaaacccattgcaatatgccgacccgttcgcctgaaaagcgtacaattcaggtgttttattcccatgaccctttagcaaaggcggcaatggttggattttactaaagtcccggaaaattctgaactgggtaggcaggcttctgaatacgcctatatgggaacacttggagaaagctactcaatcattatgcgacttcttcctccaagttatcgaatgtttcaacctcttgcggtgctttatgatagtatgatatttgtaacggatgcgaaccctacaaaaatattagaagaataacgtatgcaaaacttccagtttgttgaactgaatccgaaaagcattagagcgcagaggagataaaatcctttgcgtaaaagactaacgaacatatttaatgaaacgtcggaaccatcttctttttgttgtctacctataataacgattggagtagtcgattatagacactgcaataaaaaaaatctgaaaatatatttatcaacattacataaaagtgtgtagatgcacataaaatgggaatacatattgaaattcaggtcgttctgtgatagaatctcattactaaaaagtgtgtagatgcacggaaatggggagtgtaacgatggagattaaaagagacgcttacctacagcagctgatcgagcgaaaagataatggaatgataaaggtgattactggcattcgtagatgtggcaaatcctttttgctgtttaccatctttaagagatacttactggagaacggcgttgatgttgatcatattattgaaattgcattggatggtattgagaacgaggaattaagagatcccaaggtatgcttcaagtacatcaaggatgccatgaaagacgacgggaagtattatctccttttggatgaagtgcagttcatgctacgatttgaggaagtgctgaacagcctgctacgcatgagcaatattgatgtgtatgtcaccggaagtaattccaagttcctgtccagcgatattgtgaccgaattccgtggcagaggtgatgagattagaatctaccccctctcctttgcagagttttattctgtctatgacggcgattatgatgatgcctgggatgactacatgatctacggaggattgccgcagatcgtaagtttccagagcgaacgacagaaagcggactatctgaagaacatctttgcaaatgtctatctgaaggatgttattgaaagaaataaaattcagaatgtggatgagattgggattctggttgatgtgcttgcatctgcaatcggcgcaccgaccaacccttcaaagattgccaatacctttgccagtgagcgccagatgacttatgctaataaaaccatctccaagcatatcgatcatttgacagatgcctttttgatttccaaggcaagccgatacgatattaagggcagaaagtatatcggtgcaaatctgaaatactattttactgatctgggactgagaaatgcacgtctgaatttcagacagcaggagcctactcatatcatggagaacattgtttataacgagctgctgatccgtggctacaatgttgatgtgggtgtcgtggatatcttcgataaggataaagagggcaaacgtgttcgcaagcagttggaggttgactttgtggcgaatcaaggaaaccagagatactatatccaggttgcatatgacatgacttcggaagaaaaacagacgcaggagttcaattctctgcgtaatatcccggactctttcaagaagatcgtcattgtaaatggcagcaaaaagccttggagaaatgatgaaggttttgtcatcatgggaatgaagtatttcttgctgaatgcgaatagtctggaattttaagttgatttgaattattgctgtggtgttgttttatttcaaaaaagagtgaaatgatataaataaggccacggctgatttcatgtgggaacagccgtggctcagtttatttttttatccgtacaaacgagactgttccgcagattatgtagaacagacagagtacgattccgatagtgagaacatacgagaataaagatgaacttaagaacgagataaacaaaagtttggagaattgagaaaatcggaatttgtggagagatttcctgagttttccttattttacaggctttttagccccttagatagtgaaatgatatgtattttcccttatttttacccttgtgaggaatccgcaagggaaataagggaaatttttatttaagcgttgctcgctactttatcaagaagtcttgcggaatcccgctttgcttttcttgttgagtgagcgtaaatgttcattgtggtactgacatcggaatgtcctaacagttcctgtacatctttcggagcagctccattcgagagcaggttgctggtgtaggtatgtcgtaactggtgaaagtgaaaatcttcaaatccttccagcttttttgatactgacctgcaagcaatgccgagtgtactcggcagttccagactgccatccggtctgaggcagacaaaggatatttctttataatctgccgggacttcctgtgttccgtcaaggtgatagtattcataatacaccctgtttttcacatgcacctctttgtagtagttgcggtggtaaagttccccgtactgcatccggcttttcagttgttcccgtcttgctgctttcaatatttcagtcagcgtatctccaaaatcaacaatccttactttctttcgcttggtcgttccaatcacatttttatgctttgcaccgtcgtaacggatacttcttttaatggtcaggcattgatcttcaaggttgatgtcctgccatgtaagaccacaggtttcaccgatgcgaagtcctgcataatatgcaatctgaatcggcaggatcgcaggtggatttttcttttccagatacttgataagtcgctcataatcctcatgtgaaatcggctgtgtgccatcttcgacttcatcatcggaaaagaggtcaacttcctctgcctgttttttcagcttaatatactgcatcggattgaaactgattaactgttttggaaatactgcaaaacggaatgactgctgcaacactgcggaaaaagaatggatataatctttactgtatccttttctcacttttccgtctggaaattcgccaccgaatgtaagcagatcaagaaatgcctgtaaatgttcggcagtaactgttttcagtttacggtctgcaatcgggtgtttcttagtgcaacggattgcactgagataattttccactgtgccattactgagtgttccggttttcagttcttcttctgcccacatgtccagaagttcacctacggtaaggttatctgcttttgcaacaaatttcttatcttcgtaatcttccagtgccttgcggagaagtttttctgtctcacttttgctttcggttccggcatattctttctgaaccattttgccgcttgcgtcctctacatagaagcggtagtaccatttctttcctttctttctaacagatccttttgccataatcgtatgtctcctttcgatatcagacaatcggaactgctgaaatgcttcttgcgtgtaagtatatcataactccgattatcttactataccgattcagaatcctcgtacataacttcggataaaagatttgcaagccgttgttctgctgtttccggtttcttggaatagagccttacaatatctgccatgtcattcaatgcgttgacagtatgggtgatctccctgagaaacatgatctcgttatattcatcattcgattcaaaccccattacttttgcaatgtccgcttctttggtattgcctttgtaattcttgcaggcgaactggaacgaatccaaaaacagttcatattgtttcaacattaacagcagtaggtctttggaaaaagcatcttctgttttcgtaaggtcaagaggtaactgtttgagaatatccgtcatggcatcacgaatctgtaattctcttttatccgtaatgtcggtttcatattcgtccgtttcccctctgagccattccacagatacatggagagcttctgaaagaccttccagcaccattttctttgtattgtcaatcgttccggcttcatatctctgaatcgtagatgcagtcacacccatcttttcagcgatataaggctgtgtcagattcaattctgtacggcgctgttttgccctgctaccgatcagcttgcgtaattctttatctttcatgctgatgtgcctcctttttcggtatgtcattactataccacataacaaacaatattgcaatatgcaattaaacaataaataatataatttcgtaatgcttgacaagatgatataaacacgctatactgacagcacaaaagaaattgcataatgcaatttataaggaggtggtcacatgacgcaaagaaagattgccttatctattgaggaagctgcggattatacgggaatcggcaggaacaccctgagaaaactggtggagtggaagaaacttccggtattaaaggtcgggaggaaagtcctgattaaaacggatatgctggaacttttcatggaagccaatgagggcagggacttaagggataaaggaaatgtgaaagccgtcacaagaaacggttccacttaaaaaggcggttcccgaagaaaccgccaaaggttttatcagaccgaagccatgatatacctacacgcaagcagattataccatgtacttcgtctgacagacaacaggaaacttatgtttggtagaaaaaagaaaggacgatgatatttatggcaagatcaacaaagagttatgaggagcgtctgctccagttggaaaaaagagaacaggaaagccttgaaaaagcgaaacagtacgcagcacagaaacgggaactgaagaaacgtcagaaagatgtggaaacaaaaaaacgaacccacaggctctgtcagattggcggtgcggtggaatcagtgattggttctgcgattgaggaagaagatattccgaagctggtcggcttcttaaaaaggcaggaagcaaatgggaaattcttctcaaaggcaatgcaaaaagagccagttgcgaatacggaggaagtgtaatgccggagggagtggagtttccattcccttcattgcttttttatgaagggcgcacttatggacaaccagaggtcgtccgtataagtttgccacaggtggcaaccggtctgcgctaacgcttgccgggctcgttccgtcggcgggcatttcatgcagacctgctcatgtcgcaggaggcactcttcgccagaggggcgcattccatgcaggctgttatgcacagagcactcttacgcagagggcgttccggcagataccattctcttttacaggaaatgttaactgccggaaatcaatgccgggtacggcagaaaggggggaaacggatcatggcgatctttcattatacggtaaagattgtcggacgcagcaaagggaaatccatcatatcagcgtctgcctatctcaatggtgatgtaatgaaaaatgaagaaacaggcaggatcagttactacacttccaaaagagaagttgtttataccagtttgatgatgtgtgaaaatgcaccgcaggaatggcagaatgtacctgccgaaaatatcaaacggtttcagaaatctgtccggtataaaagggcagacaacaaagaagttgtactggagaaattcaaacttacttttcagaaacagtgcttatggaatgaagttttgaagattgagaaaagttcagacgcacagcttggcagatcgtttgagttctcacttccaaaagaatggaatcgacaggaacaaattgaatatacaacagattatattcagaaaaactttgtggacaaaggcatgtgtgcagattggagcattcacgataagggcgacggaaacccgcatgtgcatttacttgtaaccatgcgtccctttaatcccgaccactcatggggaaacaaagaagtcaaagactgggagtttgtcagagatactgacggaaatattgtggttgatgaatcccacccggactggtggcaggataaaaagaatcctgaccgtcatggaatccgaattccggtattggacgaaaacggtaatcagaaagttggtgcaaggaaccgtaaacaatggaaacgggtgctgaccgatgctaccggatggaacaatccaaagaattgtgaattatggcggagcgaatgggcgaaagtctgtaatgaccatttatcagtagaacaacagattgaccaccgttcctatgcaagacagggaaaattagaaatccctacaatccatgagggtgctgatgcaagaaagattgatgagaaattccagagtggacaggtgcagacagcttcatggaaagtagaggaaaaccagatcataaaaagacaaaatgcactgctgaaaaagatacagaccagtttcggaaaagtatctggtccattatcacagtggaaggagtggttaaatgaccttagaagaaagccgggaagtcattcccatgatggagtcaatgataaaccagatcgaggaacagcagaaccttatggcagagatggtacaggaattacaggaacgggacagacagcttctgtcctttcaggagcagaaccagagtttgcagatcttaaacagcgagttatccgggcttctgaatcttttgccagatacagaagaactgctctcccagatcgaacagcaaaaagtcagaatcgaacagttggaaaacgagaatcagcaatggcaggaattaacgcagaagctgaacaacgagaacagcttattactgacattaaacagcagatagagaaagcgagggatattgatgaacgaatgcgtaaacttagagaacgtcgggcgggtggaagaactcctggcaatgacggaacagatgcaggacgaactggatcagaaagaccagacaattctggaactgaacaggcagctaaacagatcgctgaccttgaacgagaaattgaacagcgaaaacagagccgagaatatcgaagcattgcggacaaaattaaagcaaacagaggaacaattaaccagcgagacagacagcaggaaaagagccgacgcagaagtcgtggcatggaaatttaagtacgaaaaagcggagcaggcaaaacgctatgcacagacacaccaaaagacggtagaggtgcctgtcgagaaaaaagtgccttatgagaaatgcgataactgtgaccgtactgcttatcagaaagcaaaagaaaaatgcgataatcgaaaaattcagttggagaaaaaatataaacaaatgacaacaggttatgaaagccttatgttcctgttggcatggtacagcatagcaactacactgttcacagctatcctttctccggtttttcttaacgactgtatcacctttttcggtacgattggtaaaggaatcataaacctgtttcgagaatttgttacaggagcagattctttcggacagttaagcaatggaatctcaaacagtatcgtttccgggattgtgtactggctgatcgcggctattgttatgggaattttattcattataacgggattcctgataattgggattggctatcaggtgggaaaaatctaccggaaatattgttgggatatcatcagcattatggtggcaataatgagtacagctatcgtaatctactttggcgaatggataaaatctgtcattccgataaacctcattgtactgttactacttgtatatgtggtctatattggaattcgatgttatgtaaaagactggcgagaagagcggggatattattaagaaaaacacagggagatgtctttatcttcctgtgttaaaaatgaagcattgattatttttatatgagagggattatcggacagacctatatcgtgttacaaagtgttgtaaagcctgcaatttcgtgatttttaaaattgaccgttttataggatagtataaaagtttgttagagaatcttaaaaataaacattaaaattatataaatcaccactattataggattctataaaaaataattcaaaacaagtcttttattttttaaagagtgatattgtaggattgagggatgttattagaatatctgaaaaagagaaaataaaaatcacagagatgtgtgttccgacaaacggtgaattatgttcatccgatacagcctgctctggtgatattgtaattttaccaaatgatgttttgcagctaaacagtattttggggaacgaaatgctgttgccgcagagaacatttattgaaaatcctctccctatgctccaaacaacgattgcagcaaagaaatctgaacagcgggaaatattgcttggggcacttacagaaatttcagatggcgaccctcttttaaaatattatgtggatactacaacgcatgagattatactttcttttttggggaaagtgcagatggaagtcatttgtgccatccttgaggaaaaatatcatgtggaggcagaaataaaagagcctactgttatatatatggaaagaccgcttagaaaagcagaatataccatccacatagaagtcccgccaaaccctttctgggcttctgtcgggttgtccatagagccgctccctattggaagcggagtgcagtatgaaagcagagtttcacttggatatttaaaccaatcgttccaaaatgcggttatggagggggttctttatggctgcgagcaggggctgtatggatggaaagtgacagactgtaaaatctgttttgaatatggattgtattatagtcctgtaagtacccccgcagactttactttttgacgtatcaatatgacctgctgcacaatttcagatggtgttagattacgaacgaaaccattgcgtccggactcacaaaaaatacagccaacagaacaaccaacttgcgtacttacgcaaacagtcccaccatctcgccgtttaataaaaaccgtttcgatatacctgttgtctttcaattcataaacatacttttcagtatcgctacttttatagactttttttgttgatattgatagattttttttgtgaaatggctgtttatataattccgtatataaggctcttgctttatcctctccaattacttccgacatttctttgtaagtaaatccgtatgggtcattcaatatttccgtaggtgtacttttaggtaagtgtttcatttaatatccttccttttcaaaattaaaaagtttgtttttcagagtttttgattatgatttctagtttttcaacatcaacgatatgcgttaatttacatttagggcagaaaagaggaaaatttcttaataccgtattataaaatacttgaaccctcgtctttccgttacaaattggacattttatccaatatttttcaagcataatatttctccttttgtgcaaaaaaatacaggtcaattctcaacatgagcattgacctgcatttatacatataacactacaacaaaattaaggcatagtttttatactatgtctatacatcgttagttttgttgtatagcatacgcaaaataagcatgacaaaaaagcccatattgaaaatgggaaaaatcttttttgatttcaatgcttatcgaatacgcatgctatgtaacataaacatttcccccttttaataatactatacaaaaaaagcggctaattgtcaacatatacatatgaattattttggctaactgattgaattgtgtaaacatatccaagaagaaaggggaacagtaaaatgtaagagggtgaataactatggcaaaaagaccagtaccacgatacgacttcaaggcttttggggcagcgataaaggcagcgcgtgaaggacgcaaagagagccgcaagaaagtaggcgacgaaatgtttatctcgccgcgttaccttgcgaacattgagaacaaggggcagcacccaagtttacagatattctttgagctgatacagcgttaccatatatccgtagaccaattcctgttagacacgcccgccgcaaaggacacgcagcggcggcagcttgacgcgctccttgacgatatgagcgatacgggcatacggattgtgaccgcaacggcaaaagagatttccgaagtcgaaaaagagggcgaataggaatgtccggcttaaaactgaacaggatttagaaagcgttgtaatctttttttgagattgcagcgtttttcttttgcggaagtttggcaaaatcgctttttctccgtagtaagggataagagcctaaaagataaaaacattcgtagcaagcataggaagcgggtacccacttccgtattttcgccctcccgcgctgcggcgcgtcggttgaaaattgcttgttgggaagtgtcccaaaccctcggaacggaaaggaaaggagcgaacacatggacggacgcaaaaggacggtgcaaatcaaattcagagtgacggaagcggaacgggatttaatactggaaaaaatgaagctcgtacccacccggaacatggcggcatatctgcggaagattgccattgacgggtatatcattcagatagaccacgccgacatatgaacagtgggcgaaaatccacaatctgaaacaggcggcaaagactatgaactttctcaccgaaaacaagattgaacagtacgcggatttagttagccggattgaggaaatggcagcggaaagcggacaggcggcagacgcattgaagaacgccgaaaagcggcttgcggacatggcggtgcttatcaagaatgtttccacctaccaaaagacaaagcccgtctatgacgcataccgcaaggcaaggaacagggagaaataccgcgccggacaggaacaggcgattatcttacatgaagccgctgcaaggtcattgaaagcaacgggcattgcaaagctcccgaacctcgccgcgctgcaatcggagtatgaagcccttcaagcgcagaaagaagccctttacgccgactatgggaagctggaaaagaaagtccgggaatatgacattatcaagcagaacattacgtggtagataacgtaagaatgacttattaaaaaattgcatgaaaagaaagtattgggcgttattagtttttgcgttaataatagtattgcagtggattggattaggatttcatggtcaaataaggtttatttttttgataattatattagttctaattgttttatttgcaatattattgcgaaaatagcaaaagtgatttgtgaatagtgaggtaaaggaacaaggtgaagccgatacacttagggcagtcctttacggaacggacacagccagtaccgcaatgatacataagagggcttgaaagaaggtcacaaaccttgcaagtcctcttgtttattctatgtgtcgagcccgtctatgtgtcagattgcattttctgatagactgtttcttttcgtgacttatcaaagaaagttctcctgtcgggtatgttccaattgtttatttcggatataagcgtctaattcacaattatattcgtagaggcgaaagactactttgttctaaaaggtatttctatatctctaatgaatcttccgcgttcacccacatctgcaaatttccatcaagatataatcttgcatattcaagtggttcatcaactgcaagtgaagttaatgcacagtctgatccgggagtggtttttaaattcttttctgcttcccaacaatcaatgcgaagcatatagccagcactggtataaacatcaatactgtttctgtgtggattgtattctgcaaatatcgttctcatcgtatcctatctccttatcattcaatcaatcatcagatacaaaaatcagaagcatttcaatcagttcaccatgtcacttttattttgtgttatactgttttatatgattttcttgcccttgtatttgcccttatcagaattcgtaaacactgatgggacgatataacacaagggaaagaataagggaaagctcatctgcgataaatccagtgttttcaagggttggcagagaatttaataacaagatataacagttatcaaatctcttaaaacaggtgaaatctcaatcggaagttatggaggtgaaaaatgtatttcacagacgaaaaagactatattatgcgaatgataaaagaaatggtaagagtattattttctttaatgtttgggaaaaagtatgtttctgttgaacttgaaaaagaaaataaatatgaagtatcagggaaaaatttgaaagattttcttgatatgattgattctggggaaattaacgaagcagagaatatgcttttagatagcattgattatacagacagaaatgaggtaatggcagcagctcttttctaccaataccttagtgagaaggatagtgagtttttgaaaaataataattatacaaaagaagaagtgatgtctggttttaagcaattacttatgcagtcaggatatactgatttgctatgtttggtcaaagctgaagagtaatgtagaaaattcaaagagataagagtgattggctgaaaggagaaattgtattatatgttctatattgtttttgactttatgatggcagtgattatgtttttgtttggaatgtggttttataaatcagaaggaaaagctactaaattcttgtcgggttataatatgaaatcagcggatgaacgaaagaaatacgatgagaatgctatgtgtaaggcatatggaaaaagaatgatgtttatgtctgttccttttattattggaataatcatagatatccaatatcaaggaataggctgttggatcgcatgggggatatggcttattatgtttgttttgttgcttattgatagacataaaagagaacgttaaatcccagtttgcagaactgacccaaaagagctcgaaggagctctttttccttttttataatagtatcattatggtataatagagacattaaaatcgggatttataaaggagaatattgatgaaactatttttatgttcgcatttttcaagtgtaggaagtctgataaaggaagaaattgaaaataagaaagtcgcatttattccaacagcttcgctgcgtgaaggctacaccggttatgtcggctcggctcgaaaattattcaaaaagttgggagcaatcgtaactgaaattgatatttcaacggaggcttattcaacgatacagtctgtttttgaagatgcagatgtgatatattttaccggaggaaattctttttttcttatggaccggctccgtaaaacgggaactgatgggctgctgaaaaaggaattggcaaatggaaaattgatgatcggcgagtcggcaggcgcaattatatgcgctccaagcatccaatatatccagcaaatggatgaaaagccggaggactactcacaagaagatgatgcagggcttgatttgattgatttctatgttcttccgcattatcttacagcaccatttaagaaagttaccgagaaagtaatgactgagttttcggatttgaatctatgcccaattaacaaccgtcagggaattgtaattgacggtgaaggttcaaaggttatttgcaaagactaatttgaaaattcaagtttggagaattgagaaaatcagaatttgcggaggtaagtatatgaaatacgcaatagaattgtattacgataaagaaacggaacaaaaactttttaatctggcaaaacgagtagctgatgaaaaattgagtactaagttcttagaatggaaaactagaccacatcttacactggcttgtttcaatgatgttaatgaagtgaaatgtattcagcaattaaaaaattttgcacaaacacataagcctatgcctgcatatattggctccattggaatgtttaatgacacaaggacaatttttgcatcacctgtaatgaatgatagtatgtatcaatttcagagagaattacataaatgcttacaagattttgatacaactggatgggaatggtactgtccaaatagttgggtaccccattgtacattagctcttacaaaagaagatgaggaagaggttttttataaagccagtgatttgattttgcacgagtttagaaaaataagcggaaaatttgtttctgtaggattagtgaaaatatcatttcctgtcgaggaaatatataccattgaattggatagttaaattcaagtttggagaattgagaaaatcggaatttcaggaggtgtttttatgccacaaatgaataagggaggaaaatttattttcgggaaatcactcattcggacggatggaacattgcggattccaccgcaggcaatggaagaatatcacattgcagatgaaggaaaagtatatctttttaccggaagtaagattaccggtggcttctgcgtcacccggaaaggccttttgcatccgtcaaaacttggtcacattttggacgatacgccaccgttgcttgactactcagcaggttctggcgaatttatcaaatacaaggggcgttcctactgctgggtagagatttcacaggaggggcaaattcttcttacgaagaaaatgatggattttttgaaggtgagacccggaatggagctgctctctatccgcagtagcgacatcgcgtttacgatgggagctaaaggaccgctattggaaaaagcagaaacctatgatggtgaaattccgcttttttaagtgtaacaattagaagttgtcaaacaaaaatgtaaaggaatatatgaataaaaaaattggaatagttttgctcatacctatttttctaacaaatacattactcggatgcggaaaaatgagatctgaatattaatttagaaaacattgctgtgtcagaaataaaaaaattgaacatataggaactacaggtgggatagacggtgattattcgtattctttttcagataatcaaattgttgagtttatagatttattaaaccaagtggagcttggtggcaaagtagatgaaaacaaagcatcatcaaatgaagctgtttcttattgtacaatttattttgtaatcgatgaaaccctgacaattattccgggggaatattttaaaattggagatacattttatgagtttgataattatgatgaattgtgggataaatttatagtatttaacagtacaaagtaagctacgaaaactttcaggtttataagacgaaaaggttatatattttttacgggagtaatttattgttattaatggaaaacagcgttgcaactgcaggttgacacatttccttacatagatggtggatatgcaactggtaatattgctaaaattacttcataaaagaaaggagtgttgtcaaatgaacatcgcagatagaatcttatatttaagaaaatctaaaggaatatcgcaagaggaacttgcagataaggttggggtttcaaggcaagctgtgtccaaatgggaaagtgagcagagcatgcccgatgtggaaaaaataattataatgagtgattattttaatgttactacagattatatcttaaaaggtattgaagtagtcgaaaataaagaagaaaaaagtaaagaaattgtaggaaaagtgctctatattgcatctacagcattgattgtaattggattgttatgtgcaatcggtgagtggtatgaaaagcaaacaatgccttctatttatggatcaatgattattcaagtggtcggtgtttttgaatattttcttgcaaaagtaatatcaaaagaaaattcatctttttatgtgaaatggttaaatacaattataattgcttttataccaatatctatgattacgagttatatatctgagttaatttttaaagtaggaggaggtatttcaccttatccaataggaatatttcatagttttgtatttttgttggtctatcttatagttataatggtaagctatgcttacctaaagaagcaagataaatttcttatttaaatccagttgtgtgcccagctaagggtgtgtagtcaagccggtgggattccggtttatccaaggtttagccaaccagataatagcgagtcttgggatgatgccggtaacggcatctgacaagcaaacctaccaggagaagtttgcgccagaaatcgccgttcgcacttcgatggcggatttcaaaaaagaagacaagcttgtggatttgccactgtatgcaattgagcagattgccgagctatagcatgcaatccatcgcattactagtataacgaatattaaataattgctatattaaattgatactgcttcctcttcactgatttcatccattttatacttccagtgataaaccacgggttcacggttcacttcgtcaaagtacttgtaaattcgttcttccaactcctgtttggtattgacacgaattcctcgaagcatctgtctggtcatcttgctgaagaagctttcaatcatgtttaaccatgagccatgttttggtgtaaacacaaatttaaaacgtccctttggcatagtatccagaaagcgccgtgtttctttggaagtatgtgcagaatgattatccaggatgatccgaatggtatcctgtgatggatattttttgtccagtatctttaaaaactcaataaaatcagaactcttatgggtctcacttactaacggaattgcttctccagtgagtaaatcaatgccagccagtaaagagagcgttcccagacgtttgtattctgcatcacgatatacttccccatgttctgatgtcgggcgtaaatccggtaccgtattggagattgcctgaatgcccggcttctcatcatacgataccgtaatcgtcagtttataatcgtctggaacaatgagatcaccattttcatcaaactgcatttcaatctgcttataaaccaacagaacctcatgcatttttgattcaaaatcaggatcccgtttttcacagtaatatttgattttaaagggtttcatatcctgttccttaagaaatttctggatatacggtttggtaacggttgaaagccttggatatcccgcttcttctgcatgtttctgaatgtatttgtggagagaggtcaacgtccacaattcctgtgcataaccgagttctgtcggtctctgacacgcaatatgaatcatccatgcttttgcatcatcagtgatttccgatggacgtccaggacgctgaacatcaaacagtgcagcatctaaaccgcctttctgaaacttcgaaatacaaaggcgtaccgttgcggtactaatggcaagtttatcagcaatttgctggaatgtcattccatcggctttatataaaaggattctggcacggtccacaacttgtgcctgaatggttctctttttggataatgctttaaggtaatctctgtcttcatctgacagaggaagatatgtttttctcatagtgttcatcctttcttagataacactattttaccatacattatcctcaaaatatatagtagaaatttaatttattctatactagtgtgatgcgcaagtgagaaaatgtaccgagtataatataatgaggctgataaattcggaggtcacaagcacttttaaggtgttggaaatgaaatcgaggatgaagaaaatcggggaaatgctaagtttccaaatatttggagggagtaaattcatggcattaaaattaatgaaaggcagtttgcaatacaaaaatcaaattatagaaatgattaaagagtggaaatcgtataacgatacccatgacgcaaatacttcgccatgggctatatttaaaaatgattatgatgattttgaatattatctaaataatttagaaatatcaactacggatgatggatttgttcctgattctactttcttttgcttagatgaagaccgggataccatgattggtgctgttaatatcagacattacttaaacgaatatttattgaaatatggtggtcatattggagatggtataagaccaagtgaaagaagaaaaggttatgcaaccaaaatgatcagcttggctttagaagaatgcaagaaacttggtatggataaagttttattggtttgtgataaagacaacattggttctgtcaaatcaattatcaataatggcggagtattagaaaacgaagttttaaaagagggtaagctaatacaaagatattggatcatgttgtaaatgtaaattccagttgtgcacccagctaagggtgtgtagtcaagccggtgggattccggtttatccaaggtttagtcaaccagataatagcgagtcttgggatgatgccggtaacggcatctgacaagcgtagacagcaagaaagcagggttgaatagtgattgagcttcgaaacgttaacttcagtcggtcgacgtcttaactggtgcggaagacaatatcatgtaatgcgatatggcgagtgttatgtggcactgcggagtcagagaaccaatcatgttttacattgtgaatacacatcaactggggagaacctgccatttctcgaagaagagtatgaaattgcaactgaaaacggagtatttcaaatgaatggtaggtggtcggacaatcccatagtactgtagaaatcgggcaatgccgatggagggaaggggattgcatagtaaaggtcttactgaggacacattatccgtactcagggacggaggaaataatggaaacgaaattagtaagaatagctgagatatcagcaacatcaaaacatcctatatttacatcagtgtaccacttgataaatgaagatatgctaaagcaatgccataaggaattagatgggaacaaagcagtcggaattgacaaggtaactaaggatgagtatgggaagaaccttgatagaaatatcaaggaactggtacagaggttgaaaaacaaatcctttaagccacttccgtcactgagggtatatatacctaaaggaaatggaaagaaacgaccattagggattgcttcctatgaagataagattgtacaaatggcagtgaagaaaatactgggagctatttatgaaccgagattcctaaactgcatgtatggattcagaccgaatagggggtgtcacgaagcaataaaagaagtataccaacggataagctatggaaaaatcagctatatcgtagatgccgatatcaaaggtttctttgaccatatcgaccatgattggatgatgaagttccttgaatggaatatacaggataagaacttattgtggctaatacgtaaataccttaaagcaggaataatggagcaaggaaaattcgagccaacagaggaaggttcggcacaaggctcagtaatgagtccgatgcttgcaaatatatacatgcatcatgtgctgacgctgtggtttaagctggtggtgcaaagggaaatgcagggagagtgttttctcgtcaactttgcggatgattttgttgcaggatttcaatataagtcagaagctgaaagatactataaagagttaaaggaacgaatggaaaagtttggactggagctggaaagtagtaaaagcagactaattgaatttgggagatttgcagagcagaatcgtagagcaagaggagaatgtaaacctgaaacatttgattttctggggtttaccttctattgtagcaaaactcgaaagggaggtttcgtgccaaaggtacagacttcaagaaagaagttagagcaaaaggttagagcatacaagaactggatttacgataatcgaaatcgaccaatgcgagaaataattaaagagttgaacgtaaaactaattggacactatcggtattatggtgttacatggaattttcggaagataacaacattcctgcatagagtacaacagtttctattcaaagccatgaatcggagaggttgtagacgggcatacacatggaatggatttgtggaaatgctcaagtattacccgttagcaaaacctaaaacgtggtgctagaatcctcagaaagcaagagtagaaattgtattagattcaacagcatctccatatagtgaaacaaggggaatcataagcgtaggatataaaaatcattttatttttgtaccagaagatctttggaatgaagaagatgaagaagatagtgaagacgaaatagcggatgaggaagaatttactaaaacttcaaaaaaagataaagtggaaacggttgaaatctgcaaagaccttggaaacaattttgtcttgataaaattgtttgaagagctgtatagtgtagagtatcaacagtttagtgaaaattatgaaatatttaaagattcgaatttagaaaggaattttgattatggcgcgtgtagcaggagctgttcaaagacagaagactagaaaatgtaccggaaagatatattcgtctgaacaaatatcaaaacaactggcaggtgcatgtatgaagctcgaaaagaaaacgaaagtaattgagcgaaatgagaaacttagttgggcgagagctaggactcgtagtattggataataaagctgaaaaaggtggtattcctataatttggagaccaccttttttcgtttttgtcagaaagtaaaaggtgttgagaaagtatccaagctggttgtgacaaacagtgtaaatgttacttagagacagatgcaaacgaagcacaggtgagctggtgtttatcatttatgaataattattcttgacaaatatagtctaccgatatactatattgatatccgatatatcgaaaaactatataaaggcggtgcatatattgaaaattgaaaaatcactggtttccgggagcatggcgatgttgattctgagtcttctggaagaaaaagacaggtatggttatgagatgattgaagctttgcgggaaaagtcacagaatgtgtttgagctgaaggcaggtacgttatatccattgctgcacggactggaagagaaaaattttgtatcttgctatgaacaggaagtagtgggaaaagtacggaaatattatagtctgacagccacggggagaaaaaggctggaagagaaaaaagaagagtggaaagtatacgcaaaagcggtgacggatgtgctgaccatggaggggtagatatgaaaaaagaagaatatttacacattgtgacggatcagatccgctgtaaaaaagctcgtcctgatgtgaagacagagctggaagctcatatcatggatcagatggaagactacagaaacgaagggatggaagagcaggaggcaatggaacgggcgatcctggagatgggagatccggtggaagtgggagtggaactcgaccggattcatcgaccgaagatgtcatgggaaattttgctgttggtaggtattctgggcggaatcggtgtttttttacagtttgccttgtggagaggcggcaatgcaacggcgcagccaaatcggcagctcatgtttcatatcgcaggttttttgttgatgcttggtgtgtatttcatggactacagtatttttggaaaatatgcgagacagatcggtatcctgttttgtggagttatgattctggtggtttctctgggacatttggcgagtacaggtggtacttttattatgatcgggcgcttggtcatttctgttccgttggtgatgtatctgtatgttccgattttcggagcaattctgtattcttatcgaaatgcaggatatgaagtgctgtggaagagtgctttgtggctggctataccgatatgggtggatctgagatgttccctcgtgcatacattttgcatgctgttcatctgcctgtttatgttttctatcgcggtctggagacagtggtatcagattgcacggaaagaagtattgatcagtatgtgggtgtgtttgtggatcctgattgctggtggagttacagttgcggcaggaggatggatgcagccgtatatgatagaaagaatccgggctttcttacaaagatccaatatctatacacaggatatgatgcagaacatttttgcacagagccgatggatcgggaaaagcgtatccggtatggaatttctggaaagcagcctgccgggatttaacagcgaactgatcctgaccagtgtgatggcctgttttggtatccttccgggaatcttgacagttctgatctatctgatgatgatctggaaaatctttggtgtctcgaaaaaacagcaaaatcaactgggaactatgatcggatatggatgtgggcttgtatttgcaacgcaggttgcctacagcattcttacctatctgcgagttctgcgaatatcctctgtaattcttccgtttttatcagttactggtggtggaacactggtggcgtaccttttgatgggaatggtcctgagtgtttaccggtataaaaatatcccgctgcatccggaaaagagccggttgccgaggattcgaatcacaattgaatgaaaaataagaaacgtcaaaccattcgtgcgtaccggggttgacgtttcttatttatgggtcattttgttttcttatttaagagaaaatccctgttgaagaatagaattccaattacttttttgataaagaaaacggacgatagttactatctgtttcctttcatcaatagtataaaaggctaaatagttattgatgattacaaaacgaattccccaacttgccaatatcggatcctctacaagctggaatttttgtggaaaatcggataacgaattaatgtgctccgttgcagtatctaacagtttatctgcagcatcaggatttttgagggtaaattcgatgtaatctacagcacgcataatatcatgttctgcggttgaagtaatgtgaattttgtaattgtggctcatcggttatgtcgtctccgaatatcagatatagcttcggaaaatggtcttgtgttgcctgatgcgatatcatccattccttctttaagtttgctgtataattcaaatcggctggtcaattcttcataagcttcaatgctcatgactgccagatcgccttttccattcttcgtgataaaaatcggttctggataagtgtgacaaaacgtagaaatctcattgtaattattccgtaaatcagcacttgatttgatttttggcatatcaacacctccttttgatagtaaaattatacatgaattttgttatgaaatcaatagacatctttattatacactatatgatcttactataatctaaatagtctcaaacacggcaaatgcatttgcagaggatgtacaggctgctttgaatgccgggatgaatgatcatgtggcgaaaccgattgatatggagattttaatatctgtcatcacaaaatatattgaacgatgattcatttattggaaaatggatcggaaatatcatgctggaatggaacttgaacattggggaactttgaagaaaccaaacaggggcaagatgttgcagaaatgtaacatcttgcccctgttttctgatgctaaaagcatagttattacgaaatgattggaaatgttttaaaataattaaatatatagaaaaacaaaagaaagtggggcaataatcaaattaaccggcattattcctgaaaaagtgggagagaattcgtgaaataagtagaaaaaacagagattctattgactttgttcttttcttttttataattatgaataaaatattacagaattatgaaaaagaaaagaacgaagaggaatagaaatggaacgattaacaaaggtctggaattcccttcgggcgatgcttctgcgggcagtcagagaacggaaaagagaatgtctgacagtgggagcaggtacagcggtggttatcgcggctgttggaagcctgatgggcagcaagccgatgatcgtaaaacaaatgggagaaataacagtcacacaggaagcatccggccaaaaagatgaagaatcagataccggggatgatgatcctgacgggacgatcccctgtggttatgcaggggtaatcgatggaatcctggctacaaaaggacttacaaaaagttatcgggctgttggaggtccctgtgagactgttcttgtcggacagtggatgatccggacagaaaccgtagcaaaactggatgtggggaccaggatgattcaggcactggaagccgcagatcaggagacggatgatctgactcaacagatgcgtatgtcagataaagactatgagaatctccttgctatcgtggaagcggaggcaggaggagaagatctggacggaaagatcatggtaacgaatgtcatcttgaaccgtgtctcgagtgaccagttccctgataatgtaacatctgtgatctgggatcggacaggtgggagcccacagttttcgccgacagaagatggcagaatctatacagtgactgtttcggatgataccagagaagcagtaaatcgtgcgatagatggtgatgatctgtcgcagggagctttgtactttattgcgaaagatcaggcagatgaaaagaacgtgaagtggtttgatgaaaaactgacattcctgtttgcacatggtggacacagcttttatatttgagattgcaaaacacctcgtgggatactacctgctgaatagttgcataaaagtaactgttcagtaccttcacagttacgagcaaaaatgcatttaaacgataaaaacacgctttgcgagtttttatcgttatcgcggcactcctcaaggttccgtgcaagcacggactttgactcgttgctcgcgtaaatcaccttcggtgatggcatttttgcttgtatgtctcgggattttggcatatttatgccaaaacacctcgcgggataatgcctactgaatagttacgcataaaaacataaatatacaggtatgtaaatcaaagaaaataggattgccataaaaagtgacctgtgttataattctaaactatagtgatttactacataaaagcataaaaatatgtgaggagtgtacagaatggaagtattatacagaagcaccagaggaaatggaagtacagtaactgcatccaatgcaatcttaaaaggtctttctgaagatggcggcttatttgtaccggatcagattccggtactggacgtccctatggaacagctggcacagatgtcttatcaggaagttgcctacgaagtaatgagtcgttttctgactgatttcacagaagaagaactgaagaaatgtattcagtctgcctatgataagaagtttgataccgatgtcattgcacctcttgtgaaagcagatggtgcctattatctggaattattccacggatctacaatagctttcaaagacatggctctgtcgattcttccatatctgctgacaacagctgcgaagaaaaacggtgtgaccaatgacatcgtaattctgactgcgacttccggtgataccggaaaagcagcaatggcaggttttgctgatgtaccgggaactaaaattatcgtattttatccgaaagacggtgtgagtcctattcaggaaaaacagatggtaactcagaaaggagacaatacttacgttgttgcgattcgcggaaactttgatgatgcgcagactggcgtaaagaaaatcttcaacgacactgagatgaaagcagagctggaagaggctggttatcagttctcttctgcaaactcgatcaatatcggccgtctggttccgcaaattgtgtattatgtatatgcatatgcaaatctgtataaaacaggacagatccagcaggatgaagagattaatgtagtagttcctaccggtaactttggaaatatcctggccgcttactatgcaaaaaatatgggtctgccgattaaaaaactgatctgtgcgtctaatgacaataaagtactgtttgacttctttactacaggaacttatgacagaaacagagagtttattctgacaacatcaccatctatggatatcctgatttccagcaatctggagcgtctgatttacagaatcgcaggaaatgatccggagaaaaataaagttctgatggaagagctgacaaaagatggtgcttatcatatcacagatgaaatgaagatgcagctggctgatttctatggcaactatgcaacggaagaggagactgcagaaacgattcgtaaaatttataaagactgtggttatgtgatcgatacacataccagtgtagctgcaacagtgtataaaaagtatacagaggaaacaggtgatacagctaaaactgtgattgcctctacagcaagcccatataagtttacaagaagcgtgatggaagcaattgatgaaggaaaatatgcagctatgggagatttcgaactgatcgaccagttatctgaaatttccggtgtggcagtgccgaatgcaatcgaagaaatccgtaacgctgaagttcgtcataatacggtagcagatgtagcggagatgcctgttgtagtgaagaaaattctcggcattcagtgatgaagaaagaaaacaggcccttcggtcactgtgacctaaagtattcatcaaaaatttgaattttttgtacattattccttgaaatacaacatagactagggtataatacaataaaaagtaacacctggggtgtgcgaccctctctttattttgaacctacatttacgtttatgggactcctatattgttgattggatgtcaggccgtcattatgcagcggaagacaaaagagatactgcggtcacccacctagcagtcgctaggcgtcaaaaaaagggaaacggcactccggggttataaaaggaagatggggagtcatgatatgactccttttttatgtaatagtacagccgcataacagttggaacattgttgggacaagactgagggctggtacaaaagattattaagagaacggtcctgaaaagtgactgagatggagggtattatgagtgtagaaaaacaaagctttggaactacaaaaaaaggagaagccatttctttgtatacggtaaccaataaaaacggtatggtgatgaaggttacagattttggcgcgattctggtaagtgtcctggtaccggacaaaaatggtgtgctgacagacgtggtattaggatatgatcacggagaagattatcaggtaaattctcctcattttggtgctacaatcggaagaaacggaaatcgtatcaaggatgcctcttttgtactgaatggaaaaaagattcagctgacaccaaatgaaaaaggaaatagtctgcatagtggtccggatggatttgaattcatgatgtgggaagcagaaacaaaagagcaggcggttgcttttcgtcatcacagcccggatggtgaacagggatttcccggaaactttgatgtgacagttacatacacactgactgatgataattccgtagagattcactatgaaggaatttctgatcaggatacggtggcgaatatgacaaaccacagctactttaatctgggtggacatgattccggtaatgtatatgaacagacgattcagctgaatgcaactacttacacaccggtgagcgattccaaatccattccaaccggtgaacttgctcctgtagccggaactccaatggattttacagagccaaaggcaatcggtaaagaaatcgatgcagattttgcgcagttacagatgacaggtggatacgatcataattttgtattggataaaccggaaggtgcctttgactggatggcaaaagcttattgcgaaaaaaccggaatcgctatggaagcatatacagattgcccggctgttcagttctatgcagcaaatttcgtaaacggcgaaaaaggaaaaaatggcgcggtatatgctgaacgccatgcattctgcctggagtcccagtattgcccgaacgcggtcaacgatacccatttcgcacagcctttcctgaaagcaggagagaagtacgacacaaaaacagtatatcgttttctggtaaaataattaatttataaacaggagagaaggattctgtacccgttaattgagggtatgggatcctttttgtgtattttctatgactttcgtccacaaaaaaccgttcgtgggatcttagagcgtgtctgaaaaatcacaaattttgactgaaaacataacaagtccggccggataattttcagaaaaatgccatatactgagatatggaaaaaaatggtgaaacatataaaaatattccatggagatggatatggacgattgcaggtgctgtgataatttttctgatgatgtttctgccgggaatatgggaaggaaaacagagggaggaagaaaaaaagtatcttgaaaaactgcaggcagagcaacagatggcagaagcaaagaacactcgaaaaaaaacggaacaacagcagaaaagaaatgaggagataaataatccgactacatcattgacaaatatggaacaagaaaaaaatacggaaagaaaagagacgataattcgtgtattgatttctgttgacggaactgagcagtatcttcattcggatgtgaggatatcctgtccggcaccctacttggtaaaaggggatatagcagtgcagcaggaggctggcacagaactctgtttgtcagaacggatgcagcctgggcagacagttattgtggaagcaccggacacaatgtcactgactttgaattctgtcagaagaagtcagggcgcgccggcatatcagggtattctggaagtgacgagagagaaacaaggttttcgagtgatcaaccaggttgatctggaatcttatctgaaaggagttgtgccgagtgagatgcctgcggatgccccggcagaagcactctgtgcacaggcagtttgcgcacgaacatatgcagtacggcagatcagagaagaacgaatgaaagagtgggatgcggatgtggacgatactgtttcctgtcaggtgtataacaacatttccgaacaggcggcaagcagtcaggcggtggatgctaccagggggatgataatactcagtgatggaaaaccgattgaagcatattttttttcgacttcctggggttgcaccgatacagatgaagtatggaacgcgaaaaaaagtgcttcatatcttaggagcattgcagtgagtcacaaggctgtggaaaccatggtgaacggtatcttgcagccggaaatgacagagcagtcgtttcgggaacgaattttgcagagggatgcaggagattatgaaaaagaagatgtctggtatcgatggaaagtctgcattccatgggaaatgctgaaagaacgcagtgaaagaaaatggcctcagcttggtgcatttaccggcttatccatacagggaagaaatcccggtggaggagtaaaaacactggagattcagggagagaatcaaaacgcaacacttgaaaacgaatatgcgatccgaaaattcttatcgataaaagggctgtctgtaagcagaaatgatggaagtgtctgtgatacgatggaattactgccgagtgcctgttttatagtcgatttcaggaaagaacagggagcgggtacatttgtctttaccggtggaggttatgggcatggtgtggggatgagtcagaatggagcaaagcatcttgcagaaaatggtcttggctggcgggacattctgcagattttctatcagaatattactatagaaaacttgcaagaattctgaaaaaatagtatgataaaaataattatgtaaaaaccagatattgtgcagaaaggaaagcaaaatgaaaaagtttataaaaatcatgaccggattcatgaaccgcatggctcaggatcatgtgagcgcatttgccgcacaggcagccttctttattttgatgtcctttgtgccctttttgatgcttctgcttccgctggtaacgtatgtctctattacaaaagatatggtagtggagattcttttgcaaattatgccggatgcgggagattttcgaagttttctttttagtattattcaggaggtctatgacaaatcaacagcaattgtaccaatcagtgcggtttttaccctctggagtgcggggaaaggcctgcagggactgacgaatggggtcaatgcgatttatcatgtaaaagagacgagaaattatgtggtgacaaggatacggtctgctctgtatacactgatctttattcttgctgttatcagcagcctgattcttctggtattcggtaacagtattcagaaacttcttacaaagtacattccgacgcttgccaaagtcactgcctatgtcattggtatgcgtacagcagtttcacttgttgtactggcactgattttcctgatgatctataaatttctgccgaacagaaagacttcttttcggagtcagataccgggagcggtggtctcggcggtggcgtggtcactgttttcccttggattttctgtctatctggattattacgatggattttccaacatgtacggaagcctgacgacgattattctggttcttttgtggttatatttttgtatgtatattgttctgatcggggcggaaatcaatgcttattttgaagaacgccttcgcaggctgcatcaaatggcaagcgagcttattcgcagcgagtaccagggactgttaaaaggaatccgggaaaatgatacagaagaaaagaaaatgacagacaaggaaacgacagaaaagaaggaattgtagaagctactgaaaatgaccggaacagtaacaggggtaaataccaaagagggtatgaagtaggaataaagcggaaataaaacttgacagataagcggatccatactataatttatgccgaaagaaaaaagctgagaaagtgtcagtagatatatattttcttacagagagaaggagtcaccggctgcgagctcctttaagttcagatatatattgagattcccactggagcttcttctccgaaagacaagtaagagaagacgtacagacgcgttaagtcttaatgagtgtccgttaatattttaatcggaaatcagggtggtaccgcgagatgatataattgcctcgtccctccagtaatctggaagggcgaggctttttttacgcgagcaacgagccaaagtccgtgcttgcacgagcccttggcgactgtcgcgataactatgagaaactcgcgtagcgtgtctctcatagttgcgaaaacgaataaaaatcgcgtagcgtattttacccgttgcattgtgctatccccaacaaatagaaaaggagaactgccatgagtaatagtatcaaagaaacattacaggcgattctggatgaagcttctgagaagattgaacagtcagacgccctggacaaactgaatgatgtaagagtaaatttccttggtaaaaaaggacagcttacttctgtgctgaaaagtatgaaggatgtagctccggaagatcgtccgaaagtaggacagatggtgaatgaagccagggcaaaaattgaaactatgatggaggagacaaaaacccgtctggagaaagaactgcgggaagcaaagatggcagcagaagtaatcgatgtcacactgcctgcaaaaaaagcaaacgttggtcatcgtcatccgaataccattgcactggaagaagtagaaagaatttttatcggtatgggttatgaagttgtggaaggaccggaagttgagtacgcagattacaacttcaccaaactgaatattccggaagatcatccggctcgtgacgaacaggatactttctttatcacagacagcattctgcttcgttcccagacttctccggttcaggcgagaaccatggaagaagggaaactgccgattcgtatgatcgcaccgggacgtgtattccgttctgacgaagtagatgcaacccattctccttccttccatcagatcgaaggtctggtaatcgacaaacatattactttctctgacctgaaaggtacactggaagaatttgcaaaagaactgttcggaccggaaacaaaaacaaaattccgtccgcatcattttccatttacagagccgagtgcagaggttgatgtatcctgtttcaagtgcggtggcaaaggatgtcgtttttgtaaaggatccggttggatcgagatccttggctgtggtatggttcatccgcatgtacttgagatgtgtggcatcgatccgaaagaatataccggttttgcttttggtgtaggtctggagcgtatcgcacttctgaaatacgagatcgatgacatgcgccttctgtatgaaaatgactacagattcttaaaacagttctaggaggattaaaagaatgaatacatctttatcatggattaaaatgtttgtcccggatctggacgtcacagctcaggaatatacagatgcgatgacactgtccggaacaaaagttgaaggatatgaattactggatgccgatctggaaaacatcgtgatcggacagattgaaaagattgagaaacatccggatgcagataaactgatcatctgccaggtaaatgtaggcaatgaagtaacacagatcgttaccggtgctccaaatgtaaaagaaggagacaaagttccggttgttcttccgggaggaagagttgcaggtggacacgacggtaagaaaactccgggcggaatcaagatcaaagccggaaaattgcgtggtgtggattcctacggtatgatgtgttccatcgaagaacttggttccacaagagaaatgtatccggaagctccggaatacggaatctatattttcccggaagatgctaccgttggtgcaagcgcgatcgaagcactgggactgaacgatgcggtgattgaatatgagatcacttccaaccgtgtagattgctacggtgtactggggatcgcaagagaagcagcagctactttccataaagaatttgttccgccggttgtaacagctaccggtaatgacgaagatgtcaatgattatgtgaaagtaaccgtagaagacaaagatctctgcccgcgttactgcgcaagagtcgtaaaaaatgtaaaaatcggtccgtccccgaaatggatgcagagatgtctggctgccaacggcatccgcccgatcaacaacctggtagatatcacaaactatgtcatggaagaatatggtcagccgatgcatgcctatgatctggatatgatcgcaaatcatgagatccatgtacgccgtgccggaaaagacgaaaaatttgttactcttgacggtcaggaacgccagatggatgaaaacgttctgatgatctgtgatggagaaaaatctatcggtatcgcaggtatcatgggcggagaaaattccatgatcacagacaatgtaaaaacagttctgtttgaagcagcatgctttgacggtccgaatatccgtctgtctgcaaagagaatcggacttcgtacagatgcttccggaaaatttgaaaaaggtctggatccgaacaatgcactggcagccatcgaccgtgcctgccagctgatggaagaactgggagccggtgaagttgttggtggtgtggctgatgtatataccaagaaaaaagaacctgtaagagtaccgtttgaaccggaaaaaatcaacagccttctgggaactgatatctccaaagaagatatgctggagtacctgtccagggtagaactggcttacgatgaaacaaccaacgagattgttgctccgaccttccgtcatgatatcttccgtactgcagatatcgcagaagaagttgcccgtttctacggatatgacaatattccgaccacactgccaagtggtgaggcaacaacaggaaaactgccatttaaattgaggatcgaagaagtggcaagagatgtggctgagtactgtggattctcccagggatactgctattctttcgaaagcccgaaagtatttgacaaactgcagattccggcaggagatgaactgagaaaagcaatcaccatttccaacccgctgggtgaagatttcagtatcatgagaaccatttctctgaatggtatgctgacttctctggcaaccaactataacagaagaaataaaaatgtccgtctgtacgaactgggcaatgtatatctgccaaaagaacttccgctgaccgaactgccggatgaacgtatgatgttcactctgggtatgtacggagacggcgatttcttcgatatgaagggtgtagtagaagagttctttgatcagatcggtatgcataagaaaactgagtacgatccgaaagccggtaagactttcctgcatccgggtcgtcaggctctgatcagctacgaaggtgaagtgatgggttatctgggcgaagtgcatcctgcagtggcagatacttatggtatcggaacgcgcgcatatgtggcagttctggatatcctgaatgtcgtaaaacatgcatccttcgaccgcaaatacgaaggaatcgcaaaattccctgcagtaaaccgtgacatctccatggtagtaccgaaagagatcatggttggacagatcgaacatatgatcgctcagagaggcggtaagattctggaacacttcgaactgtttgatatttacgaaggagatcagatcgaaaaaggatttaagtccgttgcttattctctgaccttccgctccaaagagaaaactctcgaagaagcagaaatcaatggcgctatgaacaagatcctgaatggtctggaaggcatgggaatccagcttagaaagtaaaaaagatgaaaatatatctaattcgtcatggagaaacttcatggaatactctgggacggctgcagggaagaacggatatcgaactgaacgaaaacggtatccgccttgcaaaaatcaccggtgaaaaattaaaagatgtacattttgacctggcaatcgcaagcccgttaaaacgggcttacgagaccgccggactggtactgggtgacagaaatataccgattcttacggatgagagaatagaagagatcagcttcggagaatgggaaggactttgctgtcgaagggagaattatcagattccgtcaaaagattttgaacagttcttcacggatcccttcggttacaagccaccgaaagacggcgaatctattcagcagatggttgaccgctgcggtgccttctacgaggacctgatccacaacccggactaccggaataaaacaattctaatagcagcacacggctgctcgacacgggcctttctctattacattgacggccggaaagacgacttctggagaggtcacgtaccgccaaactgcgcggtaacgattatcgatgtgaaagatggaaaagcgacgatagaagagcaggataaagtgtactatgacccggaagatgtagtagacttttacaaatagggtatctaaaaacgtacgcccgaaagagcaaaaagatctccctcaaaagcagcgggcaggacgattttaagctatgtgttaagtgcgactagtataacgaatattaaataattgctatattaaattgatactgcttcctcttcactgatttcatccattttatacttccagtgataaaccacgggttcacggttcacttcgtcaaagtacttgtaaattcgttcttccaactcctgtttggtattgacacgaattcctcgaagcatctgtctggtcatcttgctgaagaagctttcaatcatgtttaaccatgagccatgttttggtgtaaacacaaatttaaaacgtccctttggcatagtatccagaaagcgccgtgtttctttggaagtatgtgcagaatgattatccaggatgatccgaatggtatcctgtgatggatattttttgtccagtatctttaaaaactcaataaaatcagaactcttatgggtctcacttactaacggaattgcttctccagtgagtaaatcaatgccagccagtaaagagagcgttcccagacgtttgtattctgcatcacgatatacttccccatgttctgatgtcgggcgtaaatccggtaccgtattggagattgcctgaatgcccggcttctcatcatacgataccgtaatcgtcagtttataatcgtctggaacaatgagatcaccattttcatcaaactgcatttcaatctgcttataaaccaacagaacctcatgcatttttgattcaaaatcaggatcccgtttttcacagtaatatttgattttaaagggtttcatatcctgttccttaagaaatttctggatatacggtttggtaacggttgaaagccttggatatcccgcttcttctgcatgtttctgaatgtatttgtggagagaggtcaacgtccacaattcctgtgcataaccgagttctgtcggtctctgacacgcaatatgaatcatccatgcttttgcatcatcagtgatttccgatggacgtccaggacgctgaacatcaaacagtgcagcatctaaaccgcctttctgaaacttcgaaatacaaaggcgtaccgttgcggtactaatggcaagtttatcagcaatttgctggaatgtcattccatcggctttatataaaaggattctggcacggtccacaacttgtgcctgaatggttctctttttggataatgctttaaggtaatctctgtcttcatctgacagaggaagatatgtttttctcatagtgttcatcctttcttagataacactattttaccatacattatcctcaaaatatatagtagaaatttaatttattctatactaggtgattcgcggagagccgctcatcgccaagtcttactaaacacaggatcttaaaactcgccctaaccgcccacaaaatgcttttgagagagatctttttgctcttccgggctgtgtatcgttaaaaatagtcattacatatttttgccaggaaacagctgagagctgcgggaaaccggggtggacaacactttatgggcggttagggcaagctttgaaatccgacgcttacgaagactttcgcttgggtcagctgacccaagtgaatatagtcgaagttagcggctagttcaaagttgccctgcccatgttgtccaccccggtttcccgcagctctcggcgtccccttagccaataaaaaatattacttcatcagcttaccaagatccgcataaaactccggataagaaatatccacacaatccgcccgcagcacttccactcccccttcggaacccagaccggctactgcaaacgacatcgcgatcctgtgatccagatgactgtcaatagaagcatgatgtaacggtttcccacctcggataatcataccatcatcggtaccctcgatatcacagcccatagccccaagactgtccaccataatatccagtcggttcgattccttcaccttcagttcctccgcatttcgaataaccgtagttccattcgcataagctgccagaaccgccagaaccggaatctcatcgatcaacgtcggaatcagttcaccctcgataaccgtaccgtgaagttcactgtgacgaaccagaagatccgcaaccggttcaccggcggctgttcgtttatttaacagggtgatatctgcgcccatcgccttgcatacacgaagaatgccatctcgggtaggattgattcccacatctttgatcattacttcagatcccggcaccaaaagagcagctacaataaaataagcagcggaagaaatatctccgggaacagaaatgtccagtccgtgaagttccggatccggcgagatagaagcagttgttctttcactggtgacccgtgcgccgaagtgagagagcatcagttccgtatgatttctcgaaagataaggttctgtaaccgaagtaattccgtctgcatacagtccggcaagcagaacacaggatttcacctgcgcagaagctaccggtgactgataatggatcgcagtcagcggatgcccctgaatctgtaacggtgcacactggtttcccttcagactctcgactgtagcacccatcatagaaagtggtttgatgatccttcccattggccggctctggatcgacgcatcaccggtaagtgttgtggtaaaattctgaccggcgagaataccggagatcagtcgtgttgtggttccactgttaccggtatccagaatctcagtcggagcagtaagcccgtgaaggcctttcccatgaatccggatttcctcctgcgtattttcaatatcgattcctaatttgcggaaacaggagatcgtagaaagacaatctgctccctgcaaaaaattcgtcactcttgtcgtaccgtcagccagtgcaccaaacatcacagcgcggtgtgagatcgacttgtctcccggaatcttcacctctccgcgaagaggcatttttgcctgcataagttccatatgtacatcctccttaccgaatatgaagtgtataattccgttctttcaaaacaccctgtgccttcacacaggattcctcatcataaaactcgatccgaagaacaccttcctcgaattctctgttatgaatgatgccgatatttttaatactaattgaattcatcgcaagcagtgtggcaattgtagcgataccaccggcttcgtcataaatatcacagtaaaaggcataaatcttctcgattacccctttgctcgcttccggaagagaattacggtattctctggaattactaaacatattatagatttcatctgcatcaccattatccacccagcattttgcctgtacgatcaggcgaatatactcatcgagtactttggagatcatcgatcggttttccagacagatctgctgccacatcacaggagaagaagaggcgatacgtgtaatatctttaaaacctccggctgcgatcagtttcatattttcctctggtgtatccattttctgtacagcatttaccagtgtagaggcgatgatatgcggcagatggctcacagccgcagtgatataatcgtgttcttcataagtaagtaccagtggaatagctccgagagaagaaatcagttccataaactgtgtcagacggggaatatcaatctgaccacctggtgtaagaatatagtaagcattttcgatcagcatatcagtggcattttcaaaaccggttttttcagaaccggccatcgggtgtccaccgatgaagtggtcatccagccccagtttctcaaccgcctgatgaatctcaccttttacacttcccacatccgtaacggtacagtccgggctcatatgatctttcagccattcgagataagaaatgttgtcatgaaccggtgcgcagaggaaaatataattgcaggaagcaaatgcctcgtcttctttcgtgcattttacatcaacaattccttcagacacggcgagatccagcgtagcttccgttctggtatatgcaaaaattctggtctgtggatgaaaacgtttcagagatttggcgatggatccgccgatcagccccagaccgataaatcctatattcagtgaatcactcatagttgtctgtcaaaatcctttctcagtaattacgcgtgtattttgcgtacttttaccattgtaaagcacaagataggaaaagtcaatgctttagtgctttaaactgcggaactttaacgccggaaagtacaggtaagagattatacgacggggagaatcaaaagagaagaagaaaatatatacagtacaaaaatgggttctttgagataatttaacaaaatgaagatagaatatacaaaaaagaaacaatttatatcgtaaaaacataaaatatacaaatacaaatgaaaaaagttcagaaaataattgtcaaaattacataaataacttgaaatattcaaagaaatttagtaatatataactatactaatttttgggaggtattacatatggacgtttttagaactgaccgaataaggaatgtagtgctgcttggtcatggcggagcaggtaagactacactgacagaagctatggcttatctttcaggtattacaaatcgtttaggcaaggtgacagatggcaataccatcagtgattacgacaaagaagagatcaagagaaaattctcgatcagtacttctaccgtgccggttgtatgggataaggtaaaagtaaatattttagatacacctggattctttgattttgtaggagaagctgaagaggcagtagccgccgccgatgcagcagtgatcgtgatctccggaaaatcaggcgtacaggtaggaacccagaaagcatgggaactgtgtgaaaaatacagactgccacgtatgttcttcgtaacagagatggatatggatgatgtcagctaccgtcaggtagtagaagatctgactgagctgtatggcaagcggatcgctccgctgcacatgccgcttcgtgaagacggaaaatttgtcggatatatcaacatcgtaaagaacaaaggtcgtcgttacatcgaaaaggacaaaaaagaagaatgtgagatcccggaatattccaaagaatatctggaaaaatacagagagatcttactcgaagccgtagcagagaccagtgaagaattcatggatcgctattttgcgggcgaagaattctccgtaaccgagatttccgcagcattatccatgtgcgtaggcgatggaagtctggttcctgtatgcatgggatctccggtcaacctgcagggggttaagatcctgttagacgatatttgtggatacttcccgagcccgaatctgagagaacgcgccggtatcgtaaaatcaaccagtgaaattttcgaagctgactatgatttcaccatgccgaaatccgcacaggtcttcaagacgatcgtagatccgtttatcggaaaatattcactgttgaaagtttgttccggtgttatcaagtccggggataccttatataatgtagaaagagaagaagaactgaagatcggcaagctgtatgtcatggaaggatccaaaccgatcgaggttccggaacttcatgcaggcgatatcggagccgtagccaagatcaacgaactgcgtaccggcgatactctggcaacaaaagctgtcccggtattctacggcaaaccggagatttccactccatatacctgcaaacgctacaaagcagtgaacaaagcagatatggataagatttcccaggcactctccaagatgtgtcaggaagatctgacaatgaaagtagtcaatgattctgcaaaccgtcagactcttctttatggcatgggtgaccagcatatagacgtgatcgtcagcaaactgcaggaacagtataaagtgaatgtggaactttccaaaccgaaagtagctttccgtgagaccattcgtaaaaaatcagatattgataaaaaatataaaaaacagtccggtggacatggccagtatggtcatgtaaagatgacctttgaaccatccggtgatctggatacaccatatgtatttgagcagatcgttgtcggcggagccgttccgaagaactacttcccagcagtagaaaaaggtctgcaggaatctgtagtatccggtcctctggcagcatacccggtagttggtgtgaaagcggttctgtatgatggatcttatcatccggtagattcttctgagatggcattcaagacagcaacaaagatggcattcaaagacggtttcctggcagcttcgccggttctgttagagcctatcgtaaatatgcagatccgtgtaccggataaatttaccggtgatgttatgggtgatctgaacaaacgacgtggccgtgtgcttggtatgaacccggataaacagggatataccatcgtagaagcagacgttccggaactggagatttacggatatgcaaccatacttcgttccatgacaggtggagccggtgatttctcttatacatttgcccgttacgagcaggcacctggcgatgtacaggaaagagagattgaagcaagagccagcaaggtagacaaaggggaagaataacccgacagtatgaaataaagaataaaagtgcaagggagaacatcctgtacagttttaaatgtacaggatgttctttctgcttgcgaaaatatccgtgagattatataattcacatagctgtgaaaatatttcataaaaattcaatggggcctgacaccatcgacgaccggcggtcgaaggggccagccagaaaggattatagaattatgtacgaaaatggatataaaaaactacaggacagtctgatcgatgtgattgcagaggaacaggcaaagcttggatatatgaaagaaccgatccggctgtattatcctttgagttctctgcatcatttttttgaaagcgaaggtgatgcagaggcgatgcaggagtcactgggaggatttccggaggcaacaaaagaaatattcggggaagtacaggtatcgcacaaaggagatcgtttctgcttcttcctgtcggaacatgcgacagaatatgtgcacgaacaccgggacgagaatgcatttatctttgcactggtacagttacttacaaagcacggaacgacgttggatgaggtaaaagaattattccgcagtcagacatctgagtgcgcgatggaaccgatggacaacggagaatttgacctgatgatccgctttgtggactcagaagatccatattactactgttttaaagatgagggctgccatatcatttaccacagatttcttccggaggattatgcagatttcggattctaaaagaagaatcattggttgtaaaatatcagaaatgaaacagaaagttgatattttggaaaaaatataggaaagaagagaaaaaaggatgtctgaaaaacagaaaaaaaggcagtggcatacgccgacagaaagaattatgatgactggatttggtgtagtgatcatactgggaacgcttcttttgtgtctgccggtttcatcggccagtggaaagggcgtatattggcttgatgcgttatttacggcgactacatctgtgtgtgtaaccggccttgtgaccgtgcccactgcaaccacctggagcgtgtttggaaaaattgtgattctggggctgatccagtttggcgggcttggaatcatggcatgtatgatcatgatatttctggttttgcgaaaaaaaatcagcctgcagagtcgcaaactgattcaggatacatataatctgccggtactgaaaggaagcgtgggaattgtcagaagactcctgatcggaacagcggtggttgagattgcaggagcgatatgttatagcttttggtttgttcctcattatggactgtggagaggaatcgggtacagtattttccattcgatatccgcgttttgcaatgcaggaatcgatctggtaggtgaatcttcttttgcgccttttgtaaccaatcctctgatgaatgttacaaccatgggactaattatcttgagcggacttggcttccccgtctggtgggaagtgatcgagcatgtgcaggatctgctgagaggaaaacgaaccagaaaaaattttatccgcggatttacccttcatacaaaactggtattgacgacgacagtaatcctgatcacaggcggggcacttctgatcctcctgttggactggaatcatacaggatctctcagagatctgaaaccgggagagaaagtgatggctgctttttttcagtccataacaacaagaacagccggatttgagacgattccacagaaaaattttacggatgggtctgcgatggtgagtatgattctgatgtttatcggcggttcaccgatgggaacagccggtggtgtgaagacaattacggttgctcttcttatcgtgctggttacttcttatatccgtggaaatcatgatacggtagtatggggaagaaaagttgtggaagaaaatatccgctctgcggtggtgattttcttttttgcactgactactgctcttacggccacgatccttctggttgccgtcagtggtcatccgcttctggactgtgcctatgaggttgtttcggcggtggcgacggtgggactgacccgttctctgacttcacagcttccggcagcagggaaaatcattgttatacttgttatgtatatgggacgaatcgggccgattacacttgcggtagctcttgggcgcagaacaagacatgtggatgcggatattcagagaccggaacagaggattctgattggataaaagaataggggagaacagattaacagaaaggaaaataaaaatcatggacaaacaatatgcagtaatcggacttggaaaattcggttatgctgtggcacagacactgtcacaggcaggaaaacaggttctggcagtggataaagaccaggaactggtgcaggagatagcagattatgtgacttatgctgcaagggcagatgtgacggacagccgtgtatttgaatcgctgggaatcagtaacatggatgtggtgatcatagggatctcggaagatatggagtcaagtattctggcgacattgcaggcaaaagaggcaggtgttccgctggtaatcgccaaagggatgaatcagatgcatgccaagattctgaaaaagatcggtgcagaccgtgtagtgatggccgaaatcgaaacgggtatccgtcttggtaaaaacctgatttcaggaggatttcaggatttctttatgctgtcagattccttttcgatggtagaacttgcggttccggatagttggatcaatcataatctggaagaactgaatctacgaaaaaaatatgaaattaatgttattgcaatcaagaaaggggaaacgatttgtgtcaacatccatccggaagaaaacctgtgtatgggagagatcttgattcttgcaggagaaaataaagcactggccaaattaatgaaaaaatataaagagggagatatttgaagccccttcataaggattaaaaaagaaatctgtcagtagtatgtcaggtttcttttttttatgtgagcaacatgtctgagtccgtacctgcatgagatattagcgacggtctgaacagtaactacaggaataccacagactatataatcgaaagacaagacttgacatgcccaaaatgttgtactatcatccagatagttgatagtacaactaacagacagatattctacaaaaaacagaaagagaaaagtataagtgaagaaaggacggggtatttcttatggatgatacaaaacggcagatcacgaaaatagccagggaagtaggaaaatttacagttcaaaccatgaaagaagagggaatcggaactgcggagtttgatgtgattcatctggtacgtcataatccgggaatcacccagaccaaagtgcgtgaaagtctgaagatggataaaggagctgcggcaaaacgggtagcccgcctggagaataaaggatatctggttcgaaaaccgaatccggaagatggaaggagccagctgctttatgcgacagaaaaagcggaacacttgaaaaattccaagacatcgatcgaaaccgtattttatgaatggctgttagaggatctctcaggggaggaaaaggagcatttttgtaaaacactggacatgttgtactggaaatcaaaaagagaacgacaggcaggatttgaaaatattacacggattttggcaaaagaggagaatgacggggatggaaaacaaggaactgcaaaagaagagagaggatgagaagttttgtccggaaaaaatcggttcgtattttcgggtagaatggaaagttcttcttacaattacaatctccggcctgatctataacctgggacttctggcggaaccatggtttgatggaaggatgacgggaatgttggtggatattctgagaggcagcggaacttttgccaatatgctgtctcttgtaatcggttatgtggcagcaatcgggatcgtacaggtatccagatatgtcaaacgtttttatgtacgcaggtttgcaaataatgtaaaccggagaatgaaagagatcctgtatcacactcttgtgaccaaggggagggcgagccttcgggaagaaggggaaggaaccatcatgacaaaagccatcctggatgtagatgattgtgtggagggcatgcgtaaattcacgacggagatttttgataccggtgtggctctgacagcctatgcaggcatgcttttgtggtatgactggcggcttgccctgctgtgtatgatctttccgccgatttcatatattacagcggagaagatgaaacggatgatccagagaaccggagctgcatataaaaagcagtgcggagtattgagcgcagtgactcttgatcgtgcacagaacgctgtcacttaccgggtgtttggctgtgagagagaccggcagatggcttatgagaagaatcttaccgattatgaaacatccgcggtaaaggcaaatatctggaacagtgccatgcctccgatttataaagtgatttctatgaccagtgtattgtttattctgtattttggtcagaaaaatatactgggaagcggatggagcagctggtcaatcgcaacatttaccacgtttctggcatgctttgtgaagctttctacaaaatcatccagtgcggcaaaactcttcaatgccgtacataaagcgcaggtttcctggaatcgtatccgtccgctgcttgactcggtaaacgaggaagaagacggaaaagaatggagacctggagatctggaagtaaaagatgtctcatttgcttatccggatggaaagcgcgtgctggaacaagtgtctttttcagcaaaaccggggcagatcatcggcgtgaccggtccggtagcctgtggaaaatcaacccttggaaagttatttttatgtgaatgtccatatgagggaacggtacgatttgcaggaaaagatttgctgcagatggaagaggcagaacgtaagggtattgtagtctatctggggcatgatccggagctgtttcatgacagcgtcagagataatgtgttgttgggagacgaaaaagatttgaaaacctatctgaaagcagtgtgtattgaccgggaagtttctgatatggaagagggagaggataccttgattggaaatggtggggttcgcctttccggaggtcaggcacagcgtgtggcactggcaagaacactgtgccataaaaagccgttactggtgcttgatgatccgttttctgcactggataaatcgacggagaaagaagtgtttgccaatgtacgggcgatgacccgtgattcgatcgtgttgcttttgtcacatcgactgtatctgtttccacagatggatcagatcatctggatggacgagggaaaaacgaccgtgggaacgcatgaggaactgttacagaaagtttcggcatatgcggcattatttaccacacaggaaggagaggacagtcatgaagcataaaggaaatgtacgaaatattctgatcgatacagtaaaaaaacaaaaatggctgtccagcgggatcctgatcgcagtactcggagccatcggagcctctctgatcccgccgcttcttcttggaaaaatcgtggacagtattacggcaggacatgcggtagcgttttcgttctttgtcctctattttgttgtgcttgccctgacaggttttatggatacggcgcgcgagagtcttctgactgttttcggacagaagatcacgcatgcgcttcgaagccgcctgatggaaaagtttgtcagcctcagtgcggatacgatcaatcagcaggaatcgggaacgatggtatcaaggtttataggagatgtggatacggtagagaacctgtttacttccggaatcatcagtatgtttgcggatacatgtaagatcctgagtatcctggctgtgatctggtttcggaataagggattgacgttggttttactgtttttattgccatttttgttctggtttaccagacatgtacagaaaaatatgttgaccgcacagatcgagaaccgaagagcagtaggccgtgcctcgggtcatgtgccggagacgattcacaatattcggacgatccattgctttggaaaagaaaaatatatggaagagcggtatgacaaatatatcagcgacagctatcgggcgatggaacgaacgaacttctatgatgcgatttactcaccggttattctgattctgaatgccgttgtggttgctgttgtgatgctgttatctgcatctggcaatcagcagattctgacattctttggaatgtctgccggaacagcagtagccgtgatcaattatatttcccagattttcacaccggtagaaagccttggtatggagattcagacgatccagtcagcgatggcaggtattcacagaatcaatgagtttttcaatctggaagcgggtgaagcagacagagcgaacggaaaacgacagggtgtccggaaaacagcaaaagatatcagtgaacagaaaaaacaggttacaacagataagatgcatacggcagatgccggagatcagaccgcggtatcctttgaaaatgtagtctttggctatgacgaacatctggttctggaaggtgtgagttttgaggtaaaaaaaggcgaacaggtcacattgtccgggcgtaccggtgccggaaagagtacgatcctgaagctgctgcttggtctgtatgagccgcagagtggaagcatacggatcggtaatgtttctgctacagaagttccggaagaggaaaggagatcgctgtttggctatgtggagcagtctttccatatggtgccgggtacggtgcgtgagcagatcacactgtatgatcggagaatcacggaaaaacaggtgcaggcggcagcaagactgactggtcttgaagattcgatcgccagtctggaaaatggctacgataccgtgtgtaccccggagatcttttcgcaggggcaatggcaattgttatccatcgccagggcagcagttgcagaaccatcgattctgttgctggatgagataacggcaaatctggatgtggaaacggaaaaggaagtcttacaggcactgcggcgcgtatcggaaaaccgaacggtaatctcgatttcccacagaacttcagcggaaatggggcggatcataatggtttagtaacgttttcacttttttttttcggaaaatcatggtaaactgttaaagtgtgacaggtaacaatacggtagatttttgcatttatgaaacggtcacctgcacaaaaaaggaaatcgaaaaaacagaagaactgttccggtgatgagagttaaaaacggaacggtgataaaggagaaattacaatgccagtatttgattttaataataccccggataaagacaaaccgttgacctgtacttatacaaccttccgctccgacgaatccaccgctacaccggaacgcccgatgctggtgctggataacaaaaaacggcagtggaaacaccattccagcggatttttttccaatccggcgaaacagacgacttttgaatttgaggaggaagacggtatcgtatccgcggacatcctgcagatcgatgcccgttttgtcagtctgttaaaatggctcggcggtaatcatattcatatccgtctgtccggtgagaaccgagaaaatggatatgccgtttataagattcgtgagatcgctttcggcggcggtaccaaactttcagcagaagatggatttttacagtttatgatcgagcgtcttctggcaagcaatgcaccggaagagatcgaagaggatgaggatgcagaagaagtcggcgacgatatgaaactgaccagtatacagagcatcaccgactttatgacctgtgccggaaaaacactgccggataacattcgtctctgggcgagaagaaacctggcggttgcaaaatcccatgaggtatctccggaagagagacggcatgcacagagagcactgtcgattatgatgaatgtacagtggaagagtaattactttgagtctatcgacccgcaggaagcaagaagaatcctcgatgaagaactgtacggtatggagaaggtaaaacagagaattatcgagacgatcatccagatcaaccgtacgcatacgttaccggcatacggtctgcttctggtaggacctgcaggaaccggaaaatcccagattgcctatgcggttgcacgaatcctgaaactgccgtggacaactctggatatgagttccatcaacgatccggaacagctgaccggaagctcccgtgtctatgccaatgcaaaaccgggtatcattatggatgcattttcaatggcaggagagtccaatctggtatttattattaacgagctggacaaagcagcctccggaaaaggaaacggaaacccggcggatgttctgctgaccctgcttgataacctgggattcaccgataactatatggaatgtatgatccctacggtaggtgtctatccgatcgccaccgccaacgacaaatcccagatcagtgcaccgctgatgtcccgttttgcggtgatcgacattccggattatacagacgaagagaagaaaattattttctcaaaatatgcactgccgaaagtactgaagcgaatgagtctgaaagaaaatgaaattattctgacagatgaggggctggacagaatcattcagaaacatgcgaataccagcggtatccgtgatctggaacaggccgcagagcatatcgcagccaatgctctgtatcagattgaagtcaatcatatgcagtccgtaacgatcgatgcacagatggtagagaaagtgcttgagtaataaatacgaaagaaagtgtgacggatgattgggtacacgaaaattgccaaaggaggataattgttatgtggaatggaaagaaaaaagcggtaacattcagttacgatgatggtgtgacacaggatcgccgtctggtggaaatgatgaatacttatggtgtaaaaggcacctttaacttaaacagtggtatgcagtcttatgcaaatgtatgggaacatcccaaggggcttctgattcatcgaatgaacactgaaggtttaaaagaactgtatcagggacatgagattgcagcacattgtctgacacatgcagatcttcccaaatatgatgaaaagacgatccgcaatgagattctggaagacaagaaaaatctggaagaacggtttgggcagcctgttgtgggaatggcgtatccgtttggtacttataacgatacagtagtggatattgcgcgtgcctgtggtatccgttattcccgtacgatagagcggaccggaaattttggacttccggaagagccgctgacactgaagccaacctgccatcataatgatgcggatgtgatggatctgattgaacgttttctggcatctgacagtgaggaaccacagcttttctatctgtggggacacagttatgagtttgacgtggatcagaactgggatcggatggaagagatcctgaaaaaattgtccggtcatgatgaaatcttttacggaacaaacagagaagtgttatttggtgaataataactatctcgtacataatattatgattatgttctgaatactatcagaatctgtgacagatgcaaagaaaaaaggagaacacaaatgcaatatgcaatcataggagccggaggaaccggcggagttatgggatattttatgacaaaggcaggaaaagatgtgacactgattgcccgtggccgtcatctggaagctatgaaagagcatggattgactctggagcgtctctgggatccgaatcctgagacaattgctgtgaaagcaacggatatggaacactacaaggaacaaccggatgtgatcctggtgtgtgtaaaagggtattcactggaagataccgtcccgtttatccgccgcgtggcaaaaccggatacgatcgtgattccgattctgaatatctatggaaccggtgcaaaactgcaaaaagaactgccggaacttctggtgacagacggatgcatctatgtatctgccaacatcaaagaaccgggtgtgttagtgcagcatggaaagattctgcggatcgtctttggagttcgggaaaagacagactggagaccggaactggaacagatccggcaggattttatagacagtgctattgacggaattttatccgaaaatattcgcagagaagcacttgaaaaattctcctatgtgtctccgatcggagcagcaggactgtactgtaacgcggtagcgggggattttcagaaagagggcgctccgcgggaactgttttgttcgatgatccgggaaatcgcagcacttgcagatgctatgggcgttccgtttcaaaaagacatggtagatgttaatttacatattttgtctaatcttgcaccggaaacaactacttctatgcagagggatgtaatggctgggaaaccatcagaaatcgacggactggtatacgaagtggttcgcatgggaaaactgtatggtgtgccggtttcctcttatacaaaagtagctaatcgactggctgagaaaaaagggatcatttttgatatggatggtgttctggtcaatacggaaccgttgcattttcggtgttggcaggaagtgctgaaagaggacggaatcacgctggactatgagatttacaaaccgtgcatcggttctaccagagaagttttccggcagctgatggtggatgcttacggtgatattttcgaggattatccgacgatgaaccggagaatggaagaaaagaaaaaggaaatcgtggaaaaagaaggattcccgcaatgtgaaggaatccgggaagttctggaaaaactacatcaggaaggatatctgctggcagtcggatcttcttctccggaagatgtgatccaaaaagtgttgaaggatcttgacctggctcagtatttttctgcttttatcagtggagaaaatatggcacatccaaagccggcaccggatacgtttcttgccgcagcagatgcattattactggatccttccgcatgtatggtagtagaagattccactaatggaggaaaggcggcaaaagcagcaggaatgtcctgcgtctggttccataatccagattccggagatcagcagattccggatgcagttttggagatttcttcctgggacccttccagtgcagagaaaattatgaaagtatcagaacaatgagaaaaaacagaacagccatgcaagtattttgaataaaaggagcagatggaaatgtgtacagcagctacttataagacaaaagatttttatatgggacggacgctggattatgaattctcctatggagatgagattacagtaacaccaagaaattatccgtttcattttcgccatatggaagaactggaaaatcattatgcgatcatcggtatggcacatgtagcggatgattacccgctgtattacgatgcggtcaatgaaaaaggacttggaatggcagggttgaacttcgtaggaaacgctgtctaccaggaaatccaggaggggcgggaaaacgtggctcagtttgagttcattccatggattctttcccagtgcgcatcggtagaagaggcgaagaaaatgctggcggagatgaatctggtgggaaccgtattcgccccacagtttccggcggcacagttgcactggattctggcggacaaatatgcgtgtatcaccatcgaatgtgtccgggagggactgaaggtttatgataatccggcaggtgtactgaccaataatccgccatttgaacagcagatgtttttattgaatcagtatatgcatctgtcaccgaaacagccggagaatcatttttccgagcagttgccattacagacctacagccgcggcatgggtgcacttggacttccgggagatctttcttctacttcccgctttgcaaaagtggcatttaccagagcacatgcagtatcgggagattccgaggcggaaagcgtcagccagtttttccatattctgggatcggtggaccagcagcgcggatgctgtgaggtggcagacggaaaatatgagatcacgatctacacttcctgctggaatgctcagaagggaatctactattataatacctatgaaaaccaccagattactgcagttgacatgcaccgcgagaatctggacggaaccacactggcacggtatccactgattcagaaaggtgagatccagtggcagaactagagcgtgtctgaaaaatcatttccggagagcctttttcagacacgctctagaagatgtgaaaggtattcccgggatttttttactcgttattgcgatagtcgtcagggtctcgtgcaagtacggactttgaatcgttgctcgcgtaaataaaaaagacagaaatctgtttcagacatgtaccaatggtacgggacgattccgatttctgtctttttgtgtttattgctcgaatgattctattacagaatctatggtgattactgcgccttcttcatgcgataacttccactactggtgcggaaagcgtcgatgatgcgccgtacactacagagtaaggtaagtccgtatccgatgaacagctcgctgtaatagcttccggtgagttcggaaagatccagaatattatccagatactgataacactcggaaaaggtgtatccttcgtctttcagtgcatcgtaagcatcccaggtccaggaaagccgattagcaaagaaaatcatcaccagcatcatcacagtggaaatgatcacacccttccgatccagatgaccgccaagcagttcatatccacgcagtgcgcagattgcagtgactgcaccggcaatgcccgcgatgtatccgagccgatagatcagtacccagagcacacatccgatcagagaaccgacgaaagcacctacgagtccggcaaccagattactcttttttgcacgggttgtctgctgattttgctgaagattctgctcgatctgctgtgcacaggaagtacacagataatggtaggaaccattaacctcataatttgacagatattcctgtgtgctgccacaggactcacagcaaggctgatagttaccgccatgaagatactgaatcagaggatctacgacaccgttgatcatatccggaactttgtttccgtttactgccggcatttttatcgtcagcagaacggaggtggaagtacaggaataatctaccagatgtttgacattttgcttctggtattccagatactgcgccagttgtgcgttgtcgggatcctgtgcggagacggcattgatacgaacatgataaaccgccgactctgttgtaatgacaaccggatatccctgataattgccatctgtgtagctgccgtgatccgtcagacttcccccaagaagctgtatacgtattttttccttaaacatattgaaatcctccctcaaaatttatatgttctgcccgtatcataacaaattctgacatgttttaccataaacttcagaattttgtaagaaatagaaggaagatattatatagacagaaagatataatataattcatgaaaatgtaatgattatttcacgcttgtaataataggaatttcatgttaaaatacttcaaaaatgaacattctaaaaatgtaagagaggtatagaaggcatgataagcattgagtatatacataaattgctggatgtctataatcagctgtgccgaccgttgtgccagcagaccggcatcccgcagacatccctggatatcctgatgttcctgaaaaacaatccgcagtataaaactgctgcagatatcgtaaagattcgtggaatcaaggcaaatctggtatcgctccatgtggaacgcctggtgcaggaagggtatctggaacgccgtgaggtgccgggagatcggaggaaaactgagttgatctgtacggaaaaaacagagaatgtctggagacagggatgtgagatccagagaacatttatcgaaacgctattttccgggatatctgcagaatcaaggaaagtttttgaacaggtgatggaacagacagaggaaaatctgaatacatatcaaaaggagaacaaaaagaaatgagtattttattgacagtaattgttacattttttgcaggtatgggtgcaggtctcgggaccggatttgccggcatgagcgcagcggcggtcatcagcccgatgctgatcacattcttgggaatggatccctacatggcagtgggaatcgcattgtcctcggatgtgctggcaagtgccgtatccgcatatacttatgggaagaataagaatcttgatataaaaaatggtctgatcatgatggttaccgtgttgttgtttaccatagtgggaagttacgtttccagcctggtaccgtctacaacgatgggaaatttctccgtcttcatgaccttcctgctcggtatcaaattcatccttcgcccggtcatgactacaaaagaagccatggcacaggtgtctgcgaaaaaacgtgcgattcagtctgtgatctgcggagtgatgatcggctttatttgcggatttatcggtgccggtggcggtatgatgatgcttctgatcctgacatccgttctcggatatgaattgaaaacagccgtgggaaccagtgtatttattatgaccttcaccgccctcaccggagccgtatcccactttgccatcggcggcacaccagactggacagtatggatcctgtgtgtggtctttaccttcctctgggcaagaatcgcagccgtatttgccaataaagcaacgccaaagactctgaaccgggctacaggagtgatcctggtggtgctgggagttgcggttatggcgttttcggtgttgggatagagtaacaaatgtctgctggtcggatgactctttgaaaatatcatgcataaccacgtagactatacccgaaaatgatatcagctgcgaaatggaaagaaaaaagttaatagataataaattggaggatacaatatcatgataatcagaactgcaaccatagatgatctgccacagatcgccgccgtagagtccgagtgcttcccaccggccgaagccgccacaaaagaggaattcgccgaccgccttattcattacgccaaccatttctggctgatgttcgacgagcaaaatgataacaaactggttgcgttcgtcgacggttttgtcaccaacggaccggatctgacggatgaaatgtatgaaaaagcttccatgcacgacgaaagcggtgcctggcagatgattttcggggtgaatacaatcccgtcctatcgaagacgcgggctggcaggagaactgctggagcgggcgatcgaagatgccagaaaacagggaaggaaggggttggtgctgacctgcaaagatgcattgatccattattatgcaaaatttggtttccaaaatgaaggagtaacagacaaatccgtccacggcgatgctgtctggaatcagatgcgcctgaccttttaactggagttaacaggaactaactaccagctttacacagatttaacgaaaatcatacaataccatgatagagccatatgcgttctcccactatactgtaaaccgtaaatgaattatacagattcataacagagattttacagatgatttcaagaatcgagcagcagacagctgccggaaaagggagaacacaaaatgaatgaaaatgtaaaagtagtatttgggctgattggtgggttggcgctgttcctttatggaatgaacagtatgagtgatgcgctgcaaaaggcagccggagaaaagatgaagaagattctggaatttcttacgaagaatccgatcatgggagcgctggccggagccctggttacggctgtgttacagagcagttcggcaactaccgttatggtcatcggctttgtaagtgccggactgatgagtctgccacaggcgatttccgttatctttggtgctaatatcggtacgacgatgacagcccagctgatggcattcaaaatcagtgattacatttatccgttgatcttcatcggattcatgctgaacttcttaggaaaaaaagaaaaagttaaaaatattggtatggttatcttttctttcggacttttgtttgaaggaatcgagatcatgggcagcgttatgaaaccactggctggaagcccgatctttgtggatctgatgggaaaagtgtcatccattccggtactgggtgttgtcctcggtgcggtgatgactctggtggtacagagttcctctgcaacgatcgcagtccttcagagctttgcttcccaggcaggaccggacggtgtcagcagcgtgatcggactgacaggagcgattccgattttgcttggcgataatatcggtacgacgatcacagcacttctggcatccataggacaatccaaagatgcaaaacgtaccgcaattgcacacagctttttcaatatcacgggtacctgcgtatttatctggatcattccgtggtttgcacaatttgtacgttatatctctccaaaaggaaatgagatcgatgtgatctctcgccagattgccaatgcacatacgacatttaacgtggtctgtacgctggtatggctgcctctaatcccgattatggtgaagatcgttaccacgattatacgcggagaagataagaacacaggtgtagtttatgaaccgaagtatctggataacaaagtgattgatcagccggtggctgcgatgtatctggtatctcaggaactggaaaatctggcaggattttccgtacatatgctgaacagcctgaaaggttctctgaatcagaaaaagacctcagctgcatatgaaaaattcaaaaatcagctggatatcgtccagcacctgcaggaagaaatcacggactatatcacaaaattgttttccagcggtaatctgacagagcttcagtctgaacaaacagcaggacttctgtatgtaaccaacaatatcgaacgtatcgccgaccggtgtcaggatatcgacagcatctggataaaaatccaggacaatggcatgagcttttccgaggaagccggcaaggaaattgaaaattgcatcaatgtccttcttgatctgctgcgcttggcgatgacagccgtaaaagagggcagtgaagaggaagcggaactggtattcaaaaataaaaagaaattgcataaagcagaaaagaaattcaacaaagcccacttgaaccgcgtaaagaatcagaaatgcgatccggcgatgaccggctgcttctccggcatcctctacaacctggaccgagctgccgacaactgcgtaagtatcgcagaagaagcactggataaccagggattcgtaaaattaggcgaagccgccagaaactttgcggcaccggctgcggttgtggaggctgtgtaagagataataatagtaataaaaaatatataatttaagaggaacagagtatttttgattttgagatacaacaaaatttgaaaatactctgtttttggttgtttgagcaatgaacgaaaatcttttccttcataagaaactggtgattaacgcggtagctgaagatggaattaaaattgcaaattttatttgatgtgatatgatttttatagataacatattatccaaaacaagtaaaaaatccagattttggataatatatgatccatagaaaggaaaaatcgacatgtcaaactatgaaacgatgaaagaccgtatgtcctcccatttcctggaatacgatcaggaaaaaatgatccggaaatttgctctggagcatgatgaaaagtatctctatattttctttgtaggaagaaaataccggatcaaccgcatcaccggaggaatcacctggtctgtggatgaattccagacggaagaaaatgcaaattacaacgaagccatgacaatttacgatgtcctgtgtaattctaaagaatactgtcatcccgcccatgaatgggttcatatcggcagcctttctacggtgcggggaggaaatctggcaaatgacagtaactttttcagggatgcaggaaagaaattcgatggaaagactgcagaactggcaaaagcctgcgagcggctgcatgggatcaggctggaaaaaggcgatgtggcttaccagctggaactgttttcgtttcttcccgttatactgagattctgggaatccgatgacgaattccctgcgagtttgcaggtgctggtggaccggaacattctggagtatatgcattatgagacggtgatgtttgcaattggacatttgctggagagagtggaagaagagatggagcgaaagtagagaacaggttgctataaaccgctattatccggaagaacggtaacagcggttttattgcattatgggctttagcctgttgagtgagatggagtttttcgctgttccgaaaaatggaatttcactcaacatttaaccacccgctatgcgggtgcgcgtcgattgttatacaaaaaaattacctttcgatttacaataaagttgttcaggctatattgcagaaaggaaaggtaatttatggcgaagaaagaaaattcactcgcacatacgaaatggatgtgcaaatatcatatcgtctttgcaatggtattttcaatcacacatcgttgtgtgaattttaccagagcaagctgttactccatttaacaataccttttgaagaaaagccaaagaccaatttgccgggcgataatctaaggtactaccgtcagcgaaaacagatgacaacaaggcatatagcagaaaagctggatattgtaccagcgactgttacgatgtatgaaaacgtaaagcagcctatcccttatgatgtagctgtcaaactggcagatattttggaaattgaagcgtccttgctctatgatgatttcttccgtttccttgccgtgccctacaccgaagcactaaagagcgttagaacggctctgggactgtcacagaaggcttttgcagagcaaatagagattgcacccggttattactataagctcgaaggaggcaatcgcagaccgtcacgaaagatttatcagaagatatgcgctatgctcgaagccactggtctacaaacttcacttttatgggaacatccattacaatgaaggtgaaagaaaaatgattggaggagtgactatgacacagaatttgacttatacccgttgcggcgattatcttatccctgatattcagttgagcaacacaagtaataaaccgcttggaaaatatggcaggatgcgcagggcgtttcttgcggaaaacaatccaatactcttggatgacatgattctgacggagaccttgtttccgcacttatgggaaattgacgaaacagctcaccgtagagtaaaacagataatgactgaacttctggagagaaatccggctccggataagtcaatccaacagcttgcttgggtgcagcacatgagtagtctaaaagcacaggcggaggaaatcgttaatgcagaactgattttttgctaacagaatatagaatttttacttagggctgactgtaacaggtcagctctatttttttgatgggataattcttgaattgtatttatggcagttccagaattgtgcttttgacaattcagctatatggtaggatggcaggaatgcagattggatcaaaatatttatcgattgagaattgcaatttgaaattgaaatttgagaaaaaagaggtataatgtttttatagcacaaaattatgagaagttcacctgagaagttgcgtttgtgggaggttgaaacatggctgtttgttataataaattatggaaaattcttattgatcgtggtatgagcaagacggaacttattaaggcagcaaaaattagtacaaatgccatggcaaaactgggaaagaacgaagatgtccgagtagaggttttggttaaaatatgcggagtgttaaattgctccatagatgatattctggatatcattccagaacagacagcttaaggcaaggaggatatactgatgagtattgttttatcaaagaaacaaatgacagaagaagatatcaaattgaattatattactcctgctattctgaaaggctggaaaggtcatatcacgatggagaccagaatcacagatggtcgcatcaacatcaggggcaatatcgtagttcgcagtaaacccaagtttgtcgattatttgttgtacttaaacgatggcaagccgattgccgttgtggaagcaaaggataacaatcactctgtatctcatggattgcagcaagcgatgacatatgctcagatgatggatttgccgtttgcatattcgtcaaacggtgacgctttctatgagcatgattttctgaccggacaggagcaacagattgaattggagaaatttccgacacaagatgagctgattgcacgttactatgcggagctaaatggtggaaatggcatttctgtcgtggaaaagaaaattgtttcccagccgtattattcatctcagagtacttatccgccaagatattatcagcgaaatgctgtgaacagaacggtggaagcaattgcaagaggacagcagagattgctgcttgtcatggctaccggaacaggcaaaacatatactgcttttcagattgtatatcgtctgctccgttctgaccttaaaaagagaattttgtatttagcggacagaaatattcttgtagaccaaagtattgcacaggacttcgcaccgcttgaaaagacaatttacaaggttaatttttctgacaaagaatgtttgcgagaaattgcatcccatgaagtgaattttgccctctatcatcagatggtaggtcagaacgatgaagaacatttcaggcagataccggtagaatatttcgatcttattattgtagacgagtgtcaccgaggaagtgcaaaggaagatagtaactggcgcaaggttttggaatacttttcttctgccactcagatcggtatgaccgctactccaagggaaagtgaaaaggtatcgaacatagattattttggagagccggtttatatttacagcttaaaacagggcattgaggacggcttccttgccccgtttaaggttatcaatatcacaaccaacatcggagacggctggagaccataccaagggcagaccgatattttcggcaatgtcattgaagaccgcatttacaacaaccgggattacgattacaccatcattctccaagaccgcattgatgaggtcgcaagggaaattacggaatatctgaaaagcaccgacagaatgcagaaaactatcgtcttctgcgcttccgaagatcatgcagaacgcatgagaattgcccttaccaactgtaatcaggatatggtgaaggagaacccggactattgcgtgagaattactggctcagatgtatacggcaagtccaaacttgactatttcatctctgtatccgaaccgtatcccgttattgcaacaacatcggaactgctttccaccggagctgactgtaagatgaccaagctcattgttcttgacaagacggttgagagcatgaccactttcaagcagattatcgggcgtggaacccgtatcagagaaaaagacggcaaaacacattttgttgtcatggactttcggaatgtgacaaggctattttccgacccggattgggacggcccggttgagcaggatgagggcttcaagcatggcggcttcaagccagagggtagcggtcgtggcggtggtggaggtatgcagcctcctgatgaccctgtggaaacgcccgtcgttgacagagatggctgcaaggtaaaaattatcaacaagaccgtttcagtttatgatgcgaatggaaaactcctcaggcaggaggacattatcgactacaccagaaccaacatcaagggtgaatacgcttcgctgtccgattttatccgcaagtggaaagcgtcggacaaaaagaaaactattgaggaatctttcacggcgatgggcattgatctaaaagcattgaaagcagaccaaggtatggaagatgtggacgatttcgacttcatctgttatgtggcatatggtaaaaagccgctgacccgaaaagaacgggctaacaatgttaagaagaaagactttttcagcaagtattctgccgacgcacaggccgttcttgatatattgctggataagtatatgaaccaaggtatcacagaggttgaggatattaaagttctctcccttgcggattttgccaattacggtaagcctgcaaaaattgtcaagctgtttggcggcaaggctcaatatgaaaccgctgttagagagcttgaggcaagtatctatgaagaagtagaggtaggataaatatggcgatgcagtcaggttttataaaaagaattagagatataatgcgtatggacgctggtatcaacggcgatgcgcaacgaattgagcagatggtatggatgctttttctcaaagtctatgacgcaaaagaagatgattgggagctgaatgaggataattatgaatccatcattcccgaagaccttagatggagaaattgggcgaaagctgatggtagcggtcatgctatgactggagataagctccttaattttgtcaacaataccttgttcccggttctgaaaggcaatgatgtgaaagatggtgatgcggttctctatgaaggtatcaaggtgacacccgatactccaattaagaaagccattgtcaagtccaccttcgaggatgctaacaactatatgaaggacggcgtttatcttcgtcaggtcattgatgtcactgacgagattgagtttgacgatgtgaaggaaagccatgctttcggttttgtctatgaggagattttgcgggagttgcaatctgctggttcttccggtgaattctatacgccgagagcagtcaccgagtttatggcattgatgataaagccgcagctgggcgaaaagatggcagatttcgcctgtggcaccggtggatttatcacctcttggcttggacagctctccaagcaggtaacggacaccgccgctcagaagcagctggatgatagcatttacggaattgaaaaaaagccttttccctatctgctgtgcgtaaccaatatgctgctgcatgatattgaagtcccgaacatctatcacatgaactcgttgaaacacaatttgttggactatacggatgatgataagtttgatgtgatattgatgaatcctccctatggtgggcatgaggacaagtctattcaaggcttcttccccgacgacttggcaagttcggaaacagccgacctgtttatgtcggtcatcctgtaccgcttgaagaagaacggcagagccgccgttgtcgtgccggacggctttctgtttggtctggacaacgccaaggtaaacatcaagaaaaagctcattggcgagtttaatctgcataccgttgtcagactgcccggctctgtgttcagcccctatacttccattaccaccaatctgttgttcttcgacaacacaaagccgacaacggaaacatggttctacagagtggatattccatccgatagaaagcatttttccaagaccaagcccatggagctgaagcacttcgaggattgtatcacttggtggaacaatagagagataattcctgacggcgaatacttcaaggcgcagaaatttaccgctgactatctgctaaatgaacagggttgcaacatagatctctgcggttatcctcacgaggaagaagaagttctcgacccgcttgatacgatcagagagtatcaggaaagaagaaccaccctcaacgctgaaatcgacaaagttcttgcagagttggaagcattgctgccgggaggtgtaacagaatgacccccgagcagttgaaggcaagtattcttcagtatgcaatccaaggcaagctcgtcgagcagagaccggaagaaggtactggagaagaactttatcagaaaatgcaaacagataagcaaacgctgattagggaaaagaaaattaaaaaagaaaagcctttaccagacattatcgacaatgaaattccttttgatgttccggaaagttggaaatgggttaaagttggtaatgttggttcgtggagttctggagcgacgccctcaaggacaaatccagcatattatggtggttctattccttggttgaaaacaggggacttgaatgatggatttattcaagaggttcccgaatatattacggacttggctctggaaaaaacatctttaaggctcaatccgataggttctgttctcatggctatgtatggagcaacgataggtaagctcggcatattagaaattccggttacaacaaaccaagcatgctgtgcctgtatcccgtacgccggaatgaataacaagtatttgttctattatttgatgtctatgcgtcaatcttacatcggaatggcagaaggtggagcgcagcccaatatatcgaaagaaaaaatcgtgaactcactgattcctctgcctcctgcagaagaacagcggcgcatcgttgccaagatagaagaacttcttccgtatgttgaccgttatgccgcagcctacgaaaagttggaacagtttaatgccaagttcccggaggatatgaagaagtccattcttcaatatgccattcagggtaagctcgttgagcagcgagctgaggaaggcaccggcgaggaactctatcaacaaattcaggcagagaagcaacggctcattgcggaaaagaaaatcaaaaaggaaaaacccctgcccgaaattgcagagaacgaaaagccttacgatatccctgacaattggacatgggtgaggtttggtgatttgggcagctataaaaaagggccttttggtagtgcaataactaaaagtatgttcgtcccaaaaggaaatggtgcaattaaggtctatgagcagaagaatgctatacaaaaagatgctactcttggagattactatatccgcagagattattttgaatctaaaatgaaaggatttgaagtttttccgggagatataattgttagttgcgctggtacaattggagaaacatacgtaatgcctgacaaatttgaacaaggtattattaatcaggcgctaatgcgaatgaagatttttgaaccattgtacataccatacttcttaaccttttttgattttgtattgaaaaagaacgccagaagcggtagtaaaggctctgcaattaagaatattccgccatttgagattcttaaaaattatctcgtccctatcccaccccttgctgagcaaagacgaatcgttgccaagctggaagaaatcctgccgttgtgtgaacggctaaaatgaggtgctttaatgaaaaatttagatcgtaaagtcacgctattgtgtcctctttgcggtaatgatcaatttgagtcgttagatgaagaatttgaagatcttcttcatgcaagtgacgatgtacgagtacgttgctctgattgcggttcggaatacacgaaacgagagttgctcgataacaatgccgcaataattgataatgctgtagatgagcttgcgcaagacgcaatcaaagaactggaaaaagaattaaagaaagcgatgaaaaaatggaagttttgattggcatattgaaggaagtggtgcccttcataaaagattggggtgcgctaatcatcgcaggtatatctctgttagttgccatcatttcgctgtttaaatcttcaaaggcacaacgtctccagaacaaggttaatgaactggagctcaagattaagcagaatgaactggacaagatagccaaggagaaggaagattcggtacttgcatgcgttgaggtaagatttattactgtgggcaaaggtaagcatagactgaaagtttggaattccggaaatgcgaccgcttataatgtaagcgctcgatttgatggtgatgttggaattatgattatggatcgtgaaaagcagccttttgaagaattggaggcaggaaaaagctatgaattgattttaatcacgcataatggttttgcatcaaagtttagaataatcactgagtggacagattcaagcggcaaacagcataccaaaacacaaatgggcgatttttcgtaaatttaattgtggttgttttgtttcggactacaaatcacatttgataattaagaggaggggcatcaatgaatcacagtgaacgagaacaattctggcaaacattatgttctttgcctggaaatgatattgtggcagaacgcgaacaactattcaaatcaattaagtatccgaagctgcttttccggtatcgacctgtcagcacaaaaagcttggaagcactcagaactaacaggctctatttttcttctgcgaattattatgacgatccttttgatacctttcttcacatcgatattgaagcgatccggaaagagtatctaagtgcattccagactccggaaagtacagaagctgttgtggatggtgttaagtcattgcttgggaatattctctctgaggagcaagcagcgcagtttacggttgagaatgtgacaaacgcgctttctcacgggcttaccgaaagctttctgaatgcagcgctttcactccgtgatgaagttaaaaaggatacgtggtcagtttgtttctccgaaaatgggtttaatgaggttctgtggctgaaatatgcagatcagcacagaggttttgtgcaaatctacgaccttgaaaacaatgacaacttcttatgcggtaagcaggagaaatgcgctaattgcggaatcaagaactacggaacgccgctatatccgatttattattcggacacgccttatgatgcaaccaaatttgcgaaattcgttatgctccgtaaaatagcagagacaaccgcaactcagattcctccagagctatatgcaggtatgggaagtgctttatgggaacaagaaagaacgaccctaatcaaaaaagagtgccataaatacgatgaagaatggcgaatgataactggctgcattatgaagccgccggtgatgatggaatggatcccaagcggtataattctcggtctgcgaatggacgtagcagaggaaaatcttgttgtaagcatggcaaaagaagccggaatcaaaaatatttataaatcctacataaatgcgcaaaacaagttggatgcttatcctttgaaattgtaatctttccagcgggtatgtgaatagttgaaatgaggtgaaagcaatgaggagagaagaatacgcttgtcctaatgggtgttctcttccacccagaaaaaagcaacttagggaatatagcaacggtatatatgggtttgacttttatgattttacattctgtccttgttgcggcagtttaatgccatattcactaaagaagctcaaaggattttttgaggtatacaatatccacgcagcgttatcggatgcggtgcaactcatatataaatccgagtttgagtcggcagcacgtgaagccttcgtggctgtggaaaattatctcaaaaagaagtcaggcctggatttgcatggattcgatctggcgacaagagcactttcttttgaaatagacaagcaaaccggcgaaataaagagggctccccttattgcaatcaatgatctgaaaaacgaatcccagcgcaatgaacaggacggcatcaggtatatgcttatgggcttctttcaagggcctcgtaatttgtaccagcacaatcacattggttccggtgtaagcaattctatttccgtgattatcgagagatttatcaaaagatgcccaagcgtattgattgctggagaccggtacgcctattgaagaagcgtgctcgtatgttgaagaagaatccatgatgtactaaaaagataaaatctgccgttgtgtgaacggctgaaatgaggtgagccgcaatgaagaaatgggcaaagaatccttgggttcttggaattggaacaactgtaataggtggcgtacttctttcctgaattttgaaattaaagtatggtgattgcttattgctattgcgattatcgtagttggattgtttgtggttgcaaaaatatcgggttcccagtcaaataatatacccccacatttttacaatacaccaaggattacatgttgggttattcatgggagtggacttattctaaaatgtatgatgggaaatacaccattagcaacctgcatctagtttgtacaaagtgtggtatgaggctcaaacaaggtggtctgtatggaacagaaatggagtgcctccgctgcaatacaactcaaaattgggaagattctgttgcatatgatgcccagttactgattgaggataatattagaaagaattactcgcaaaaccagtaaccgatattactaaaacatatttaactcatttgattggagggaaaaactatgatgcaaaatataaatacgtatcttgaaatgtttgagaaaaatatagaaaattaaagtggaaatagtactttggaaactggtaggtgttataacaataaaatatatactagataagaaatcgaaacttctcaggaaaactcgattttttatatataattgcaacatgatattaaaaattgtgtaattatacagactgttgtaaacgtcaaatcacttgcccatactaaaagaagggagtatatcgagaaaaattgaaaatatcttcctcccatgataatataatgaatagttaggaagaataaccgaaaaccggaggattcatagtgaaggaatattttatcagtgaaattaatatagaaaagttgtatcatttatcaaatataacgattgaattggatacaaccaagcgccagcatttgttgttaaccggaaaaaatagttcaggaaagacatcgttactgttaagattagtaagatacctgaaagtacttaaagatgggcatcttattcgattaacgggaacatggccggaatgggaagaaaatgcgaaacggaagatggaacatgcttcaagtgagaatgaacgatttaaagcggagcaggattacagacaatggtcggatatgattcgtaagtatagtgatggcataaagattgcatggaatgacaatgatggacttgaaagtgcgtatcaaaaaggagaatttataaccgcgtatttcccggcagaacggaaagcagaattttcgaaaccgaatggtgtggaaaatatcaagctggctgaggtatatgacaccgcagagaacgccggaaatattcttcttaaatatatggttcacatgaaaacccagcagtcttttgcaagaaacgaaggcgataaggaaatcgtggagcggattcaacaatggtttgacagatttgaatctgcactacaggttttactggatgaaaaatcgattcatctggaatatgattataaaaattataattttaaaatcagacaggaaggccgggagccttttgaattcagtgaactgtcagatggctattcatctgtaatctatattgtatccgatttgattcttcgaatggataaaaactggttattgggtgaagaaatcagtcagtataatgcacagggaattgttctgattgatgaactggaaacgcatcttcatattgaattacagaaaaaaatcctgccatttttaacagaatttttcccgaatattcaatttatcgtgacaacacattcgccatatattttgaattctatttccaatgcgaaagcatatgatctggaaaagcatgtggaactggagaacctggctgctttttcatcggatgaacttgcggaaggctactttgaggcagatgaatattcagatacattaaaagaggaactggagcgatatgcacagttgtgttctagaaaaaaactgacggaagaggagagggctgaacgggcagaattaaaaataaaatttaaaaatttgtcaacagatctgtcaggagctgccagagaaaaatttgaggatatcgaacggagaagggaaacgaatgattaagattgagaggaaggaaaccccgcatacacaagaggcaatggatgatttgcaggaagcatgtaatacaggtcgttcgtataatacggaacatgtgaatcaggcgttacgggaagtattccacgggaaatgttatatttgcgaaaacaaagaggcaacatcctatcaaatcgaacatctgattccgcaccggggcgataaaaaattgaaatatgactggaataatctgttttgggtgtgtgcacattgcaacaatattaagtcagacaaatatgaaccaatattgaactgtacaacagagcctgtagaacacctgattgcttttcggaaaacaggttattttggaacggatgaaaaactggagtttgtgccggtgaaggatgataatgtagcgatcagaaataccattttgctgttaaatgatgcatattatggaacgactcctcagaagaaaatggaagcaaggattatacgtaaaacgttgcggaaagatctttcaaagttcaaagaatatgtaagggagtatcaggaagcagagaacgaagaggaaaaagaggatattgcgatgcttctgaagagggaactgaaagacagttctgcgtttacggcatttaagagatggctgatatgggataatgaggaaaagtatggggaattggagaaatttattcctgagaatcagaagaaaaaattatttgacatttaaaggtggatggcgctaaccatccaccgctctggaaaaccagagaaacctcgtcggtcaaagtgtttttaatgtatggtcttgtcgaccaaaatacttgttgatttgattatacatgattttatgaaaaatccacaggaaaataaaagaaattggtggaatgaatgcaagatgaaaggtggatatgaatacataaaaatttgcacatccgtctttccagtgctatacttatctcaaacatatcaccacagaaaggggcataatcatggagacagtattacaatttttaaaagacgcagagacatattatctggcaactgtagagggtaatcaaccgagagttcgtccttttggaacagctcatatttttgagggcaagctgtatatccagaccggaaaagtgaaagatgtctcaaaacagttacatgccaatccgaaagctgagatctgtgcttttaagggtggtgaatggatccgtgtggctggcgaactggtagaggatgatcgtgtggaagcaagacagtccatgctggacgcatatccgagtttgcagaaaatgtatgccgcagatgatggcaatacagaagttttttattttaagaatgcaatcgcaacgatttctgcatttacgcatgaaccggaagtgattactttttaaaaaataaaaaattctggaaattatatgaatacggaattgagtaacgatgagccggtagccgatggttatcggctcattatgggattatgatataaagatattgtgtgagctggataaaagttttgtatagaataaaaaagaaacgagcaacccgcttggatcctaagaccgtacacgacacaaaacccatttcttaacttcattataaagtatttctatcaaaagtcaatcaaagatgtaagaaataaaggagaacaaccaatgaacaatcacgataacaaccccaaatacatccaaatccgaggtgccagagtccacaacctgaagaacataaacgtagatatccccctacaccagatcgtaggcatcgcaggtgtgtccggctccgggaagtcgtcgttggcgttgggggtgttgtatgcggagggatccaggaggtatctggaatcgctttctacttatacgcgaagacgtatgacgggtgcggcgaaggcacaggtggatgaagttttgtatgtaccggcggcacttgcgctgcatcagcggccgggaattccgggaatccggagtacgtttggcacgggaacggagcttttgaacagtctgcggctgatgtattcgaggctggcttcgcatcggtgtcccaatgggcattatgtggagccgacattaaaagtggcagcggagcaggagattctttgcccaatctgtggggaacaggtgcagccgccgagtgcggaagaacttgcgtttaattctcagggtgcatgcccggaatgtggtggtaccgggcgagtacggacggtaaatattgattctctggtacctgatgattcgatcagtatcgatgacggggcggttgcaccgtggaacagtctgatgtggtcactgatgacggatgtatgtcgggaaatgggtgtgcgcacggatattccgtttcgcgagctgacggagaaagaaaaagatattgtttatcacgggccggcggaaaagaaacatattttttataaagcaaagaattcgaaccaggcaggagaactggattttacctattacaatgcggtgtatactgtggaaaatgcccttgctaaagtaaaagatgaaaagggcatgaaacgtgtggaaaaattcctgaaagaagagatctgcccgcagtgtcagggaagcagactttccgaaaaagcgagagcaccgaaacttcgaggcatcggactggcggaggcgtgtcagatgactttaaaagatttggttgtgtgggttgccgatgttccggattctctgccggaggaaatgcgtccaatggcagaatcaatctgcgaatcctttcagacagctgcaaaaagactgatggatctgggactttcttacctgtctctcgacagagcagctgcgacattgtctaccggggagcggcaacggatgcagctggcgagagctgtaagaaaccgtacgacaggtgtattgtacgtgttggacgagccttccatcggattacatccttccaatattaatggattgaatgccgtgatgcatgatctgatcgcggatggcaattcggttcttctggtcgatcacgatacgcagattttgtccgaagctgactggatcgtggagatgggaccggaggcaggaaatggcggtggatatgtgatcgcagagggaacgatccctgagattacaaagaatcctgcttccatgattggtccgtttttagcgcagaaaacgaatttgccagtacgggaacagacgcatgctgaaaatatgtttgatctgggagttatccatctttctaccaatgcgatccatacggtaaaacctctggaagtcgatattccaaaaggcaggctgaccgttgtgaccggtgtgtccggctctggcaagactacgatggtgctggaaagtctgattccgggactggaggcagcactgaacggagagacatttccggaacacgtgaaaaatgtttctgcggaggggatttcccatgtgaaactgatcgatgcgtcaccgattggaatcaacattcgttctaccgtggcaacgtatgccaatgtgcatgatgaacttcgaaagatttacgcaaaaactgacgatgcaaaaaggatgaaatacaaggcaaaggatttttcctataataccggaaatctcagatgtccggcatgtgatggaacagggcagatcacactggatgtacagtttttgccagatgtagatgtggtgtgtccggaatgtaaaggatctcggtatgcgaaagcggcatggcaggtttgctatgaaaaggaaccggggaaaaggtattcgctgccgcagatgatggcgatggatgtaaacacagcactacaggcggcaggagactggaaagtggtgcggcagcggctggaagtactgcgagatcttgggcttggctatctgaccctgggagaggcgacaccgggactgtccggtggggaagcacagagactgaaacttgccagtgagatggggaaagggcagtttgattccgttttcgtgttcgatgaaccgacgattggattacatccattggacgtaaagacgctgcttcaggtattccaggcacttgtggatcagggggcaactgtggttgtgatagaacacgatctggatgtgatccgaaacgcagattatatcatcgatatgggtccggaaggcggcgaagcaggcggaaggatcgttgctgtgggaacaccggagcaggtcgcagaaaatgaaaacagtgttaccgggaaatttatacgttgaagataatttattttctctcattccatcttgcatcccgcagtattctccgttacaataacaccagaacacaagtttgcatcagaaaggactgtggatcttatggacatcaaggatttaattatatatcgaagaacgatccctgcgcggaaagcgatatattcctcgtttccggaatctctgaatccgaagatcgtggagtttttgcgggaacggggaattgatcagctgtactgtcatcaggcgcagatgtatgagttggcgcgggaagggaagaacgtggtgattaccacttcgacggctagtggaaagacgctgagttttctgcttccggtgatacaggagattctggaacatccgacggcgcgggcaatctttatttatccgacgaaagcacttgcggcggatcagtaccgggcattgcagccgtggctttcctttttcggaccggagaaaatcagtgccggagtatatgacggtgatacgccggtgaacgagcgaaaacggatccgggaccgggcaaatattattctgacgaatccggagatgttaaatggcgctatgctgccaaatcacagcaaatacggatttgattttatcttttcgaacctgaaatacgtggttctcgacgagatgcatacctatcgtggagcctttggatcccatatggcaaatgttttccggcggctttcgaggattacagagtattatcacgcagtccctcattttctatgtagttcggctacgattgccaatccggtggaactggcggaaaaaatctgtggacaaccatttgcttcggtgacaaaagacggttcggcggcatccgagcggaattatctgctgatacagccaccgaaaataagcggaaaggatcagcaatattacgggcaggaatccattgtgtcggtggcggcacagatgcttccacagttgatggaacagagggaaagttttcttgcatttgcaaaatcaagaaaaaatgtggaagttgtgttaaaagagacaagagaccggctggatgcggcggattttcttactacagtgacttcggatcagatttccggttaccggggcggttatacgccgatcgagcgaaagaccatcgaacagcagatgatccgtggggatctgctggggctggtgagtacgaatgcactggagctgggaattgatatcggttctatcggagtgacggtactgatcggttatccgggaacccgttcttctttctggcagcagaccgggcgtgcggggcgaagtaagaaaagctgtaccaactatctgatcctggatcaccttccgatggatcagtatatcggtctggagcctggatggctttttgatgagagcagtgaacatgcggtgattgatccggataacctgctgatcgaactggcacatatccgtgcggcggcagcagaactcccgctgtctctggatgacattgcccgcttcccggatctcggagagacgattccggtactgatgaagatgcaggaagtgcgaagccagaacggtcggtttgcatgggcaggcggcgagtatccggcgggcgatttctccatgcgaaatattgataagaacaaatacacgctgttgaatcaggaaaccggaaaaacgatcacggagatggatgaaagtcaggcgtttcgggagattcatgaaggtgcggtttatatccacgacggggaatcttaccgggtggtgaagatggatctggagagcaagatggcgtatgcgattccatttaacggaaattattatacggttgccggaggcgagacgaatattcatgtaatccacagccagaaggaacagcagtggaaccggattcgggtgcagtttggtgatgtgaatgtggcggattatgtctatatgtacaaaaaactgcagttccataaccatcagaaccttggatatgaggaacttcggacaccgctgacgaaggattatgataccgaaggaacctggatgcatctgccggagaatctggtacgggcgtatcgtggtctgctgcaggcggatgatacgggacggctgaccaggaataatcattttcagggcttgtgtttcgctctgaaaaatgctgcgcagatggtgacgatgacagaacaggaggatatccatgtgataacttccacaaatgcgctggaattatcgggtgaaacagcgtcggatgtatccatttatttctatgacggctatgtgggcggtcttggattttccgagaaaatctatgatctgatcccgcaggtgatcgaacaggcgattcggatggtgtccggctgcaaatgcaaagacggatgtgcggcatgtgtgggggattataaactggatcgcaaactgatcctgtggggattggaaaatctgcgggaagcatcggaggttcccaaaggtgaaaaagtagttacctgggcagagtccacctggaaaaggaaagaattccgactggaaacattaccggaaaagtgggatattttttgccggaaagccagagagaacggagagcagtacgccggatttttccagaccgtgcaccgggtgaaagtgaaggataccagactgattctttcggtagacacaccattttttgcacagtgggcgaatgggccggaaaataaacagagtctgcggaatctgatcggttattatacagaacttccggcaggatttcggttggaaatccgggcggaaagaccgaaaaagcggggaaatttatctgacattacgggttcagatacaagaaaaacgtggacagaaagtcacgatacagccgagcggtctgtagaagactacgatagagaagaacgggagaaacaggaaaagattcttcgccgttaccgggcgatggatatcaggagagagaaaaaagatgatggatctgaataaactgaatccctaccagaaagaggcagtgcttgatgagagtcctgcctgtctggtcaatgcaaatgtaggaagcgggaagacgaccgtgttgacggcaaaagttcgctatctttgcgaacaaaaaggagtggctccaaaggatctgatggtgcttacctttaccaataaggcagcaaatgaaatccgggagcggttggaaaatctgaccggaaaagaggaagatctgtggtttggcacgtttcacagtgtggcacttcggatgttacagacgattcttccggtagaggaacttggatatacgaaagaatttcaggtatgcatccccgaagaagaaatgcagatggcacagcagctgatcacggaacagaatcttcagattaaatataaaaaccgtttaaaaaagcggctggatcaaagccgtcagaaaagtggaagaaaaccgaaagattacggggatgattttgagcggttgtgtactctgctggaagaagaaaaaaagaaacagaataaaatgacatacgaggagttgatcttacataccggacagctgcttcagagccacccggagattctacgtccgctgtggttgatcatcgatgaagttcaggactgcgatcagagtcagctggatcttctggacagtctgatgggaaaagacagtcatctttttgcggttggtgatccgaatcaggtgatctacagctggcggggaagtgcttttcagattttcttccagctgaaaaaccgctatcaggcgatggaactcagccttccgatcaattatcgttcttctgggacgattttatctgcagcaagacgatttttgcagaatggaagtacgctggaaggggtaaaaagcgaaggcggtaaagtgcagatccgaaaacagtatgatccatttcaggaggcggaggatctggcagcccgtatccgggagcttcatatgcaggggattccgtatcacgagattgggattctgtatcgtttgcagaatcagtcggcactactggaacaggtacttaccagaaatgggattccggtgcatgtggcagtgaaagaaaaaatggaagacattccggtagtgcagtggtttttccatgtacttcggttttgcgtgaatcattcggataccacgagtggtgtggaagcgttgtgcaacaaaacgtatggagagggatggacaacgaaaaaagcattacagcagatccgacgctgggagacggatggaacattgccgaaaaattctccattgttttcggggatggtgaatgttcaggaagatgtgtttgtgacagaagaaaccgatcaattgtgggaaatgttctcactggatcgttatctgatgccttccagagttggttatcaggaagataaggcgtgtattctgggaatttttgatgcaattcggaacaaggggaatatcagagaatttttgaatgatgtggctctctatggactgccttggatgcacaattcagggaaccagaagacggagaatatagtaacagggaattacgttacagaaaagcaaagtatagaagatttgacagcaaaatatccaataaatacagcgggttacagtgcgaaagggcaaaaagatagttccagagaagaagaaattgacgctgtgcagttgatgacgcttcatgcctcaaaaggattggaatttacctgtgttttcatcatcggtgtgaatgatggtctgttgcctctgcgtggaaccagttttgatcaggaggaagaagaacgacgtctgttcttcgtgggaatgacccgcgcgaaggaacagttggaactttcctattacaccagcccggacggttacggaatcctttcgggtcccggaaaatacctgaaaatgtttccgaaagacctgattgaaggtctggatgaaccgaaatatgcagaaggaagtgcggcggaacatttgcaggcgatgaagcggcagattttgcaggcaagagaagagcggacgctgcaaatgccagaagaggactttcggacaatatcgcctgagatagatgttgaaaaaccagacacggatccgtgcaggcatgaggaaaaagaagaaaaccctgcgaagagtgcaaccaatcatacagatgcagattccgtagccaaccagccgcgcgtagcacacgaaaaatacggagtcggaacggtaatctccgaaaatgaagacaccattaccatccacttcgatgattatggagaaaaagaacttctgaagatgtttacggttttacatccgttgtagatgctgagaaccattcaatatttctgtgaatctgccataaaatgtaaaaaacaatccatggccggagtatattctccggcttttttatatgcaaatccaatccggagtaccggtgattcttccaacggaacagatatcacgccctcatgttgaaacagacgaaaattgctctctgcaaaaaggctgataccttctccgacagcaacggcactgattaaagactctacgcgtgcagtgcgaagaatcgacggatgaatacctgcattttgaaaaatctgcatacacagctgataaatggatgtgtatgggtgcatcagcagaaaagactgatcggtcagtgctgtaacagaaagcttttgtcgtgttgccagtggatgatctgccggaagcatgacacagatccggtcggttgcaataggaaaaaaatgataatgttccgtatcgatcatagattctctggcaagaatcatggcaaatcgcttcttttcgatgccttccattaattcgctttcttccacctcggtaagagcaagagaaatctctgggtgttctttctgaaacaggcggaaacttccggtaagatgatactgagagagtacaggaagcgttcccacagataattgctgttccttggcagtctgatacagagacatccggtaaagcatctgccggtattgccgggaaagttccattgtcattcgacacattaagaaacggaatgaggattctaaataactgacgggttcggagatccattagtttacccggcatagcaaatatcgaactgatattctacggcaatatctcgtgaagtgtgtcagcgaattttgaataaccgacaacaatatcaataatttctctgagaatcacaaattttcccgtgacaagtcatatattttaacgtatagtaatagatagaaaacaaatgcaaccgacgatggaaaacttttgggacgcccttttccatcgtcggttgtattatgaaagagaaggagaaaaagatgtatacactattactactgttgatttatctggcatttatcagtctcggactgccagattcccttctgggttctgcctggccggttatgcacaaggcttttcaggtcccgctgtcttatgcgggtctggtaactatgattatttccggaggaaccatctgttccagtttgatgtctgagcgtctgacaaagaaattcggtacacagattgtaactgtgttcagcgtgatgcttactgcaatcgcattattcggattttctacggctagcgccttctggatgctctgtctatgggccgttccctatggactgggtgcgggagcgattgatgctgcactgaacaactatgtagcgcttcattataaccccaggcatatgagctggctgcattgtttctggggactgggaaccattatcagtccgtatgtgatgagttatgcactgaccacatcggtatggcagaacggatatcgcatggtatcttttatccagatcggaataaccttgattcttttcgtgacactgccgatatggaaggtgaataaaaaagaaactgcgcaggaagaaaaggcagaagaagagatggtaggcatcaaaggtgcactgaagatcaaaggcgttccgaatcttcttcttggatttttctcctattgtgcactggaatcagcagtgattctgtggggaagcagctatctggtaggagcaaagggaatttctgcggaacgtgcagcagcctttgcgtccttgttttgcatcggtatcacacttggaagatttctggcaggctttattacagagaaaatgggagaccacaagatgattcgtctgggcatcgctatcattcttgttggatgtatcggtatgttgttaccggtatccatcgatgaatttgcactgtttggtctggttattatgggacttggctgtgcaccgatttatccatctatcatccatgcaacaccgtccaatttcggagagaagaactcccaggcgatcatcggtatccagatggcaagtgcttatgtgggatctacttttatgccgccgctgttcggactgatcgcaaaccatatttctgtcggtttacttccggtttatgtattgttcttcctgattctgatgttctttatgttggaaaagacatttaaactggtgaaatagtaataatcaaacagcttccgggttacgtgtcagtttcctgaaagctgtttttgatttgcataattttatttgtaacagaaaaggatataactatgtataaagaaaacaacgatataacattacaatattataatcaaaatgccggttcttttgtcagcggtacagttcacgcagatctgacagatacactgaatcgatttttaagcagactggaaccgggagcggcaattcttgattttggctgcggttccggcagagataccaaatattttctggaacatggatatcaggtggaggccatagacggatccgaagaactgtgtaaaatcgccagtgcctatacaggaattccggtacgccagatgtattttcaggatctagatgcccgggagcagtatgacggtatctgggcgtgttcttcgattctgcatctggaaaaaacagaattaagatctgtgctgaaaaaaatggcggatgccctgcgtcccgatggatggatctatacttctttcaaatatggagagtatgaagggatgcgaaacggcagatatttcacggatttcacctggagcagtttccagagattcatccgtgataccgagtcactttccatagaagaattctgggtgactggtgatgtgcgtctgggaagggaagaagaaaagtggctgaatctgctgttgcagaagcgataatagagaatggcacaaaaactatctgttgtatcagtgatatccttatttattccgtgcaatttcaataaaatccctggcgtatttgggaagataagttcccctgcgaaaagcgatgctcagtgttgtaaagattcctttttctccgacagaaaagtaaaccggttttctggaaaattccatattctgtatatatgtttccggcgtaaaacacatgcccattccctgcatacaaagttttacacaggtctccgtgttccggcttcgaaccggtacacggggctggacaccggcgcgatccagggcttcaagaaccagttttccggtggtctgttccggaaaatggagaataaaaggttcgctggcaagcgtggacagatcgattctcggataccggtcggagggagaatgatatccggaagatgccaacggatgatccggtggcataaccagaagaatttcctctcttttcagcagttcgtattccagttttggatgttccctcgtctcattaaaaatcccaaaatcaagctgatcattcaacagaagtttttcctgaacagagtatgcctcttcccagatgctgacattgacattcggatatttttttgaaaattcttccataatctgtggaatcatacagctgcttcgcatcagtggaacagcaatattcaattccccttcgttattttccgtcagatctttcagttctttttcccaatcttgttttacctgaagaattttacgggcgtattccatgtattttcttccggtataggtcggcacataagtatttccatttcggctgaagagtttcgctcccatttcccgttccagtttttgcagatgcttggtgagtgtgggctgggaaatgtagagttcctgcgctgctctggtaagattctggtgtttggcgatacataaaatatagtgcaattcactgtagttcataaaattctcctgactattctgttttggcataaaatttatgtaaaatatgaatttgacttcctgtactgcctattttacaatattttctatcagcttatcaagacatatcttattgagggaggaaaaacaaatgaaaaattggctggaaaaacagtttcggttgtcagaatttcatacggatgtcaaaacagagattcttgccggactgactacttttgttactatggcatacattcttgctactgtaccaaacatcatgtccggagccggatttgacaaacatgtaactctgacgattatgattcttctgattatcgtgactacctgtgcgatggcattgtataccaaccgtccgtttgcattagcaccgggacttggaagcgtgggtattatcgcgtctatgattacgaatgagggtgtcagcgcaccgattgctgcaggcgttattttctggagtggtgtactttttattatcatttcttttctgggactgcgggaagccgttgtgcgtgtgattccagtcagcctgaaacagtcagtaagtgccggtatcggtctgtttattgcgcttctgggagcaaaaaactgtgggctgatcgtagcaaatgatgcaaaaaactgcctgtcttttggtgatcttgcttctccgtccgttatcgtggcagccattggttttctgattctgatggttatcaaggcacggaatgttccgggtggtatgattctggcaattgtgctgactacgattgtgggaattccgttcggtgtgacacatgctccggagaaaatcttttctcttccggctggtattggcaaacaatttatgaatattgattttcttggagcgctgaattttgcttatattccgttcctgatcgccttgtttgtaccggatttcttctctacttttggtacggttctcggtgttggagcgaaagcaggatacctggacaaagacggcaatctgccgggtattgataaatgttttaaagtggatgctatttccacaagtcttggagcactgttcggtatgccgagcatgactacatatctggaatcttctgcgggtgtggaagcaggtggtaagacaggacttacggtcatctttaccagtattttctttggaatttctctgttcctggcaccactggctcttgtgatcccgtcagcagcaaccggtccggtactgatctttattgggatcaatatgttgagtgcaatgaaaaacattgattattccgatatcacagagtatatcccggcatttttgtgtgtgaccttcacaatttttgccaacaacatcgcaaatggtatctgcgtggcactgccggcatatctggtaatgaagattgcaaccggtaagatcaaaaaaatcgatccggtgatgtatgttcttgtggctgtctgtctcttatatttttattctattgtataaatgaggtgaaaacagatggagaagattcagctgttgataaaacatgcgaaagtatttaattcgtatctgaaaaaatttatcgatgcagatgtctctgtaaaagatggaaaattctactatattgacagaaagcacgaaaatctgtttgatgcggaacatacaatcgatgcagatgggcaatacatgattcccggcatggttgatatccacatgcatattgagagttctatgacaacgccgggctcttttggaaactgtgcagcgaaaaatggtgtcaccacagtggtttccgaaccacatgagctggcaaatgtcaaaggggttcgcggaatccttgagatgatatctgcggcaaaagatgcacccattgatattttctacgggattccgagcagcgttccatcgaccagtgaaaaactggaaaccaccggcggtgtgattgattttgaggcgatgaagcatctgcttggtgaaaaagatgtggtctgcgttggcgagattatgaattatcgggaaattatccgggaaaatcatctggaaatcacaaaatttctggattatctgcggcaggaacatccgggatatgtgattgaaggacattgcccgtctctggtggatctggatcttgcaaaattcctgtatcttggcattaacggagatcatacagaacataccctggaagaggtaaaacagcggatcgaaaatggaatgttctttgagatccaggataagatgttgaaaccggaagtgttatcgtatatctgtgaaaatcatttatttgaatattgttcttttgtgacagatgatacgatggcagatgttttatatgaacaggggcatctgaatactgtagtacaaaaggcgatagagatgggctttccaaaggaacaggcgatttactgcgcgacctatacaccgtgtcagagaatgcatttttatgaccggggtgtgattgctccgggaaaactggcagattttatccttctgaaggatccggcaaaattactggagcctgaaacggtgtttaaaaatggaatttccatctataaaaaagaggacagacaggcattccccgtagaaccatatgcattcccggaagatttttatcacagtgtttccattccggaagtaacactttcggattttgatgttaaagttccggtcgaagaaggggaagtaacggtccgtgcgatggaagtacatccggatcgcacccagaccacggagaaactggtaaccatgcaggtaaaagagtacaagatctgctggcaggaaagcggatgtctgctggcgatggttctggaacgccatgggaaaaatgggaatatcggttatggatttctgacaggttcgtgtcagagagagggaaccgtagcaactacattttttcatgatcaccacaatctgtttgttgcgggaaatgatccagaggatatgttgtgtgccgtacagagaatcggggaattgcagggcggttttcttacagtaaaagatgggcagattctctcggaacttgcattacctgtctgtggaattctttcggaggcatccattgaagcaacaggaagcgcgctgaaagaagtgcgggaaagtctgatcactctgggatatgaacatcacaatccgatcatgtctgtgggaacgcttggactccctgtaagtcctgcattgaaactgaccgatcatggattgatcgatgtaaaaagaggagaaatcgtgcctctggtgttatcctgttcttgatttttttacgggatttgctatatactgtttcatagttcatcggagggtaatttgttgcattgcatatctgggatcatttcaaaaaacggatcccggattcattggaagcaaaagccggataagatgtcaggttgagatacctgcctcttatccggctttttccatggagatcttctggcgggtatcctttcttccgattccgaagtgatcctggcagcgatcgattatctgaaagcatatgcgattgactgtatttttacggcggtattcttctgttacatcggtttctacaatggtatcggcatgaccaggttcgtcataattcaggaaatatatgaaacgttaaagaaaattttgtaccattgattttttaaaattaatattgtattatattaataacaggactccccacacctctcacgcaagtgatgtgtcccatggggagacattttgtattatggaggcgtattatggtaaaaccaattatgagagatatctttttcctgaaccagccatccgagccggcaactgagtcggaccggaagacagggatggatctgctggatactttgaaggcacatgaagaagagtgtgttggtatggcggcgaatatgatcggggtacggaaaaatatcattgccgtgcacatgggatttatgaatgttttgatgtataatccgaagattatcaaaaagtcaggggcgtatgagacggaagaagggtgtctttctctggcaggagtgagaagatgcatgcggtatcaggagattgaagtgcagtatcaggatgtcaatttcaaacagcagcgacagacgtattccggctggatcgcgcagatcatacaacatgaaatagatcattgctgcggaatattgatataaataaaaagactaaaatctgtaccatatacatggtaaaagagtaattacgtttccagctatgtgaaaatctgatttttcatatgagcattaaagtgaaattaactaatggattaaaacgggtacttgtgaaagtatggaacagttacaaaatcaaaataaatgaatgatagtagaaaaggaaaaaacaaacatgaaaaaaggaaatggaattgcgttactccctatcggcgtcttcctggtattgtatctggggcttggaattttgtttgaatatgtgttaaagattccgatgggattttataacgtgccgatcgtcgttgcttttctggcggcgattttggtggcgtgtgtacagaatcggaaagtaaattttgataaaaaactggaactgatggcgcagggtgtgggcgataagaatatcattacgatgttgttgatctttctgaccgccggctgctttgtcggcgttgtcggaagaagcagtgcggagagtgtggcctattttatgctggcgctgattccggcgcggttttcggttgcagtgctgtttgtagtggcctgtttcgtgtcggtggcaatgggaacctccgtgggaacgatcaccctgctgacaccgatcgcagttgcggtatctgctgcatccgggtttgatcttccgttttgtgtcggagcggtcatgggtggtgcaatgttcggggacaatctttcctttatttccgatacaacaatcgcagcctgtaacggacagggctgcgagatgaaagataaattccgggaaaacttctggatcgcatttccggcggcggtgatcacactggttctgattctggttctgtcttttcagacagagattcacggaagagtcgatcagtcgtaccatctgctgcaggtacttccctatgtgctggttctgatcggtggaatcatcggtatcaatgtatttgtggtacttctaaccggcattgcctccggtgcactgatcatgctgcttggcggacataccacaccgaccgatctgctggcaaatatgggttccggcgtctcgggcatgtttgagacctgtatggtggcgatccttgttgcagccatgtgtgcgctgatccgggaatatggcggatttgatgcgttgctcggctggatccaccggatatttaagggaaaacgcggcgggcagctgggtatgggacttctggtcggagcgatggacattgcaactgccaacaatactgttgcaatcgtaatggcgaatccgattgcaaaagaaatggcccaggaatactgcgtgacaccgaagaaaacagcttcgttactggatactttttcctgtatcttccagggagttatcccttacggtgcacagatgctggtagccatctcggcggcacatgaacttggatacgagatttccgccttccagatcatgccacggctgttttatccgatgtttctgcttctgtgttctttgatcgctatctttggagtcgagaaaaaacagaggtaacatccgatataaccggcagagcatcggaaagtgggcagcacaaaaaagttgcgcttgcaaaataagaagagtgacagaaaacgcatttcacgcatatggtaaatcagatagatagctgggtatcgtctcacagatgcggtgggacatatcaggaagcggggaatgcgatatgagtaacaaaacatatgatcgattaaaatggctcgccatgtattttctgccggctctgggaacgttgtattttgcactggctggcatctggggacttccctatggagaacagctggtgggaaccatcacggcaatcgatacatttctcggtgtgattctaggaatcagcaaatcaaaatataacaaatgcagtcactaacaacttcatactagagcgtatctgaaaacacgggaactcttgcaggcggacagagctggcaggagttctttttatgctgcgatgtatctgaaaaagctggcagtcactggtttctcagtcaaatcaacgatcttcatattccttttcgtgcaggtttgtagtaaaatataagaacgattgtcgatgcaaactggtatatttgcgactacaggaaaagaacagacaaggagtataaagaatgatacaggcagtaatttttgatatggatggaacactgattgacacagaaaaatattaccggatctgctggccacaggcactggcacattttggttatacgatgagtgatgagcaggcactttccatgcgttcgctgggacagccatatgcgccggagcatctgaaagaaatgtttcaggatcccgatctggactatccggcgattcgtgtatatcggaaacagctgatggaagaatatctggaacgagatggaatccagatcaaaccaggagctgtagaacttcttgaatatctgaaagaaaagaagatccagcgtgcgatcgctacggcaactgataaggaacgcgcggcacgatatctgaaacagatcggactgtacgagtactttgaccggatcatctgtgcaaatatggtcaagtgcggaaaaccgtcaccggatatttatatctatgcctgccaacagctgggactggatccgtctgcatgcatggcggtagaggattcaccgaacggagtgaccagtgcgtaccgtgcaggctgtcaggttgtcatggtaccggatcagacaaaaccggacgcggaacttcagaacatgttaaccgcatgtgtggattcgctggatcagatgaaagcactgtttcaataaaggcaataacacactaatgtaaatgtaatacagaaaatacgagagatctgcaggggatgggcactgtcgtatgtgaaaaaatataaaaatatggagaagagctatggcagaaaaaatggaaaaggatgcagcagaacttcccggtatcagcagagaagcagaagaacaccagctggcatatgtgatcggggttgcccaggagcatctggtacaggcgcgtaaagccatacgagaggcaaatgaagatcttgccgatctgatggaagtttacgatgcaaaagataaagaaggtctgacactctggaacaatgctacggcgcgtctgaaagaatataaacagaatatggtgcgcctggaaaatgccagaaagaaaccgtattttggcagaattgattttcttgcagaagaaaaacaacaaaaagaagcgtattatatcggtcgtgttggaatctccggggatgatgcgcagccgttagtattggactggcgtgcaccgattgcttctgtttattatgaaagcggtcttggtccctgttcgtataccgttctttccgaggggacgcatacgatcgatctggaaaggaaacggacgtatgagattgaaaatgaccggttgaaagactactttgactcggatgtggtagccaatgatgaacttctgaccaaataccttgctaaaagcaaaaaaaacgtacttggagagatcattgcaaccattcagaaagaacagaatctgctgatccgtcgctcccccaggactaatctgattgtccagggtgtggcgggttccggaaagactacagtggcgatgcaccggatttcctatattctttataattacaaagaggatttccgcccggaagatttttatattatcgggagcaataaaattttgctgaattatatcaccggtgttctgccggagctggatgtatacgggattcgtcagatgacgatggaagagctgtttatccgccttctgtatgaggaatgggatggaaaaatatacagcgttcatccggtatctcaggaagcttggcaggaacagaaaggaagtactgcctggttcgaaaaactggaagcgtactgtcaggcatacgaaaatcaggagattccacaggaggcgatcgtgatggaaaaaacgggtgtgcgtctgatgcgtcctgcgatgatccgggagtatctgcgtgacaatccgctcctttcgatggaaagcaagatcctgatgttgaataaaatgctgtatgcccgctatgaaaatgtgatcacgggaaaagtgatctctttcacagaaaaagagcggaaaatactggacaaaaaatacagcacttactttggcaacggaaaatggaatggttccgtgcgaactttttatcaggattttctctgtgcacagcagcaagagggaattcctatcgaaataccagatacatcgtttgatgtgtacgaccttgcggcgatggcatatatctataaacggatcaaggaaaccgatccggtaagggaagcaagccatgtggtcatcgatgaagcacaggactttggtatgatggtatatcgctgcctgcactactgtatgcggggatgcacctatactgttatgggagatacttctcagaatatccattttggacaggggttaaatgactgggaagaacttcgcagactgatcctgcggggaacatacgatgcattcggactgcttcgaaaaagctatcgaaacacggtggaaatctcagaatttgccacggagatccttcggcatggagattttccgatatatccggtggaaccgatcattcgccacggaaagcaggtgaaggtgcaagccagtgcagatacagttgctatgaaagatgcagcaacaaaccagattcaggaatggcaaaaaaacggatatgaaacgatcgctgtaatctgccgcgatgagacggaagccaaagaggtgtcggatctgttacaggatactccgaatctgatgagttacacaccggaacgcagtcagttcggagagggaatcatggttctcccggtggtgtataccaaggggctggaatttgacgcggtacttctgtggaatccgacaaaagaacaatatccacaggataacgggcatatcaaactgttgtatgttgccgctacccgtgcgctccatgaactgaccgtactgtatcaggattctcttacggacattataggaaccgaagtgccgaaagaaaaacatatgcaggaatttcagaccgaaagtctgcaaaaagcgaaagaatacgcaaaaccggtacacacacagaaagagatcgaacagcagcgtagagaagagggcgacagggaacggcaggcaagaggttatctgggtcctcgaaagatccagttgaaaaaggaacaggaaattgccggaacagagacaccggtgctaattcaaaaaccgtttgaagtacatcaggcactgattcccaaaaacagaaatctgttaaagaaatcaacggataagaaattaaaatcttccgccatcgacggactggtgaatccatccccgtatacgtatggaaccttcccaccggagagtcatcttcaggtcaaaggacattccagagggaatttttctgtaaaatgggtgaaaaagacaaagcagtatctggagatcgccagtgcagccggacttcttcggctgacaccgatcacaccgtcgacgatccgtatcagctttgttaaaggtgtcaccggcacgatccaggatacgaactggaaagcacaggcagataccgcagtaacatggggcgcaaaagagtcccgttctgaagtacagcttctgactgatcgtatcctgattcgggtggaaaaagcaaatggtgctgtgcagtttttaagcagagacagtaaaaaactgcttacggaaaatccttcggaacctcgattgcttctggacagtcagacctggaacttttttgcctgggataaaaatgagcgcctgaaatccaaaggtgttcttgcagatgattttatggatctgagcacgaaagcacggtatatctcttttggacagaaaaaacttcggatgccactggtactgtccaataagggatatgccatcggtgttgcggcgggaagtaccgtattattctgtaacgtgagaacctatggacaatatatttatacccagggaaccggtcaaatcgattattatttcatttacgatgaaaatcaggagagaaacatcgagcaataccgcaatcttccggtgtaatttctttcccagccgttttgaattcatgtacggaaaactaattctctgaaactgtcagatttatcttttatcagatcagagtctatagtataataaccataaatggccatatttctcaaaacacaattgagaaatatgcataataactgatttttataaaagatgaagtacaatggaggttatgaacatgagaatctatgtagatgtgaatgctgtacgtaacggaaacggaaccgaacaaactccttttcgaaaaatcaatgatgctgcaaagatcgcacaaccgggtgatgaggttttagtgttcccgggaacttaccgtgaatatgtagatccaatctatgccggacgtgaagatgcccggatcacctatcgcagtgtaaagccactgggtgctgtgattaccggtgcggaggagattaaaacctggacaccgtatcaggacaacacctgggtatgtcgtgtggcaaatagtgtgttcggttcttataacccatatacgactgcagtatatggtgactggtattttgcaaaggcagacaaacataccggctgcgtatatctgaacggtcgcgctatgtatgaggcagtaactttggatgagtgtcttcgcggagaagtgtatccatgcagctgggttccggaagaatctgtctacaaatggtatgccgaacaggattccaagacggatgaaacaatcatttacgccaatttccagggaaaagatccgaacgcggaaaatgtggaaatcaatgtgcgtcgtgaatgctttttcccttccaaaacaggagtaagttatattactgtcagcggctttaccatctgcaaagccgcaaccacctgggcaccgccggcagcatttcaggacggtatgatcggtccacactggagcaagggatggatcatcgaggactgcgatatctccaacagcaaatgcgcaggtatctccgtaggtaaatatctggatccggataacgatcattattttacatataagtatgtcaagagtccgacacagatggaacgtgatgccgtatgccgcggacagtatcatggctggctgaaagaaaaggtaggaagtcatattatccgcagaaataatattcatcactgtgaacagggcggtatcatcggtcgtatgggcggtgtgttcagtgtgatcgaagacaaccatattcatcacatcaacaacatgatggaacagggcggtgcagagattgcaggtatcaagatgcatgcagcgattgatgttctgtatcagcgtaatcatattcatcactgtaccatgggtatctggtgtgactgggaagcacagggaacacggatcacgcagaatctgcttcatgacaaccagtgtccgtcctttgcaaaaaatctgaagggcggtatgatgtctcaggatctgtttgtggaagtgggacatggaccgacactgatcgacaacaatattcttctgtctgatgctgcccttcgtttcgcaacacagggtgtagcaatggtacataacctgatctgtggttctctgacctgtgttggtgaaggaaccggctggagatatacaccgtatcatattccgcaccgtacagaggtgatgggattcatgacaattcttcacggggatgaccgtttctataacaatatttttgtacagaaatggccgaaagaagatgtgattacccctcacgattccgatgatggatatgacacggaaaaccgtctggctggtacctggacattcgacgagtatccgacatatgaggaatggatctcacagtttgactttacaaaaccggtggatatggtaaaactggaaccggtacactttggtcatctgccggtatggagcgagggcaatgtgtatctcggaggagcaaaagcatggaaaaaggaaagaaatggtctgaccgcagcagagaacagggaggatgtgaaggtggaactggtggaaaaagaagacggatatcatctggaaaccaatatctatgagttcctgaagggctttaccggaagaatgatcaacactgaagtgcttggaaatgccttcgaaccggaacagccgttcgaaaatgcagatggaacaccgatccggtttgacgaagattatttcggaaatcaccgcggtgtggcaactgtgcccggaccatttgccgaagcagaagatgctgaaaaaatgctttatgtaaaatagcaaatatttctacgattaagaactgtacggaatcctggaaaatatttttccgggatttctgtactttttttattttgtatcgtattactattgacatttcataccgtataggttaacatataaatatcacatacggtattgataaaaacatgaaaggaaagtaaaaaaatggattatatcattatggaaaacggagaaaaaattcttttggaaactcagcagaaagtgacgattcagcgaaccgtcgacatttacaaacagtaccgcaaagaactgggactgacgcagagtgagcttggaaaacgtgccggtatctctcagccgaacatcacccgttttgagagcggaaattacaaccccagtctggaattcctggtaaagattgccggagctatgggtaaaaaagtgaaagttactctggaagattaatcagggggcagtagcaatggtagaagatattttgaagaaagacggactgtcttttgccctgctgcgaaagttgtcctttcgaaccagactggaagagaacctggctcaggcaatcagctgtctggatgaagcgtttcttacagaagaactgaaaaatatcgtcgtctggtatgattccagtgatattttatccggacttccgattgattaccgcatcaaaagtcttcaggcgatcctgcggaaatatcaacgggcatccggggaaagccgggtagagcgggtatttaacgatatcctcggttttcggacattatgcgataattacgaggaaattttacgtctgagagaagcaaagaatatttccgttgcagacatgtccaacgggaaaacacacgatgacggataccgcggtgtgtatatctattatcagtatggccaccgacattacccgatcgagattcaatataatacctactatgaccgtcagatgaacaactggctgcataaatatgtatggagtaaacatcatccggcaaatgtaggaatcatcctgcgaagagagtacgagagaggaagaatccgaacagaatgtgaatgtgaggaggtgcttcgggatgtgttatctgattgcaaaaaataatcagggtgggagcagtctggcaatccaaatgatgcatggaaaagaactggcaaaattaaagcagaaacttctctcggatcttcccggtgaagaaatacagctgcttactgtcagccgtccatctgcatatacggagtatgaaccgttttgctttatggatacgccggatcattttgcacaggaagtgaaaaacagtttttcctgatatatatacccacaaaggtattgtttgaaaaagcttctgtttttgaagcaatttcgtgttataatgcatttatgcgtgaaatcatttcaaaaatatttctaagaaatctatgaattacaaatggtgtgtttcaggcgcagtgcacaccggacaggagaaagaaatatggactatatagcaagagaagatgcactggcattattaaaaagatacaatcaggatccgtttcatctgcagcatgcatttaccgtggaagctgtaatgaaatggtatgctaacgaacttggatatgctgaagacgcagaatactggggtatcgtaggacttctgcatgatattgattttgaacagtatccagaagagcactgcctgaaagcaccggaacttttaagagagggaggcgttggtgaagatatcatccacagtgtagtttcccatggatatggtatcacgatcggatgtggtgttactcttgatgtagcaccggaacatgagatggaaaaagtactgtttgcagccgatgaactgaccggactgatctgggcggcagcgctgatgcgtccttccaaaagtacaaaagacatggaactgaaatccttaaagaaaaaatacaaaagcaaaggattcgctgcaggatgctccagagaagtcatccagcgcggagccgatcagctcggctgggaactggaaaaactgctgacgatgacaatggaagcaatgaaagcaaccgaagatacgattaatgcggagtgtgaatctctgtaaaacaaatcgagatacttaatccgaaagtgaatcggctatttgacaactggtttactttcggatatttttataattcctgagaccgcggcttccttaagaatttgtgaattcttgtgggttatacttgcgaaaaacagcgtatactgatatagtacaaaaaacaacagttccaaagaggagagcagacaatatgaaaaaaggaaaaatcaaagcgcttctagtgctgctggtgatcgttcttgcagggatttattattatgtaacaatcccggcgatcaacattcattctacgggaatctggatttttatcctgtttgtactcgtattgattctggcagcttatacagctaaaaagaagtttaccagcatccgtgaggtgaaaagcagcaagtttctgaaaatcggaggcattgtactgatggctgtactgcttgtatttgcagcaggaagcatcttatcttcccccatcgtaaacgcaaaacagtatcgaaatctgttgaccatcgaggaacgcgacttttcggaagatatccagccggtgaatttcagtcagattccgttgcttgacaaagacagtgcgatgattcttggaaaccgaaaaatgggaagtatggtagatatggtttctcagtttgaggtcagcgatctgtattcgcagatcaattatcaggaaaaaccggttcgcgtgactccactggtctacgcaagcccgatcaaatggctgaccaaccagtcacagggaatcccggcgtatattatgatcgatatgacgacacaggatacctcgctggtaaaactggacaaaccgatccgctattccgaggcagaatatctgaaccggaatatttatcgtcatctgcgttttcattatcctacctatatcttcgatcagttaagtttcgagattgacgataatggcactccttactgggtctgcccggtgcggaagtatacaattggactttttggtggtgcaacaatcggcagagttgtcctgtgtaatgcccagacaggagagtgccaggattacacgttaaaagactgtccggaatgggtagaccgtgccaatccggcagatcttctgattcagcagtataattattatggaacactggtacacggttatatcaacagcatcttcggacagaaaggctgtctgaaatctacagacggatataattacatggcgatggaagacgatgtatgggtatacaccggtgtaacttctgtcagcggagatcagtccaacgtaggatttgttctgatcaatcaacgtaccagagagacacgatattataaggtaaacggagcagaagagtattcggcgatgggatccgcggaagggcaggttcagaaccttgggtacaaggcaactttcccgatccttctgaatatttccaatgaaccaacatactttatggcattgaaagacggtgccggactggtaaaaaaatacgcgatggtaaatatccagaaataccagaatgttgccatcggagataccgtatccgcctgccaggacgcttatgtgaaactcctgaataccagtggaattactgctggaaatgagagcgatttcaaaactgtcaccggaacgatccagcggatcgcgcagagcgttatcgacggcaattcccatttctacctggtattaaacggacattccgagatcttcgatgtcccagttcaggattatctgcaggtcgtaacattgcaggagggagacacggttaccgtagaatacctggaaggaactccggtttgtacggtattgaacctggagtagaaaattttcacttggcagcaaaagagtttcatgatataataagaaaaatcaactgataaacaaaatacagatgagatatgtaagtccaagggcggacatccgagagggtgtctgccttttttcgatatacaggaaattatcttcctgcatatcaagatcgcgaagcctatgttatcttattgccggcataatattcctctatatgccataaactgatatatcctgtacaggaatcagagcacctggaaaacgtacagaatcttttaaacgctcagcaactatgaagatacgaaatatttatgagatttacatatctacaccacagaagggagaacaaacatatggaaaagttcagtcaactggtaacctggatggatggaaaagtctggggctgggggatgattctgttacttctcggaactcatcttttcatgaccgtccgaaccgggtttatccagagaaaaacaatcacaaaaggaatcaagctttccgtatccaaagaaccggatgcagacggtgaagtcagtcagttcggagcacttgccactgcgctggcatctacgatcggaaccggaaatattatcggtgtgggaactgccgttgccttaggtggtcctggtgccgttttatggtgctggcttaccggtgtgttcggtatcgcgacgaaatacagtgaatcactgattgcagtaaaatatcgtgtcaaaaccgaagatggacgaatgcagggtggtgccatgtacgcactggaacgcggtttgcatatgcggtggctggggctgatctttgctgtatttgccgggtttgcttctttcggtatcggatgtgccacgcaggttaacgccatcgctactgtctgcaatgagaatctacatatcaataaagcagttgtcggaatcatcattggcgttctgacagcagttgtcatctttggtggaatcaaaagcatcgcaagggtctgtgaacgactggttccgtttatggcacttttctatgtgcttggctgtatcgtgattcttggaattaattatgactatatcatacctgcaatcacaactatctgtcgcctggcattccaaccgggagcagcagccggcggtctggtaggaagcggtatcatgctggcgatgcgttacggagttgcccggggactattttccaatgaatccggtatgggttctgcaccgattgccgcagcggcagcacagactcgaaaccctgtacgccaggcactggtatcctccaccggaactttctgggatactgtagtcgtatgtctgatgaccggtctggtactggtttctacgattatgaaaaacccggctatcaatgccaatgaaatcaccgatggtggtgtactgacctccctagccttcgatcagattccggtcatcggacctttgatccttgtcgttggaattatttccttcgcattctctacgatccttggatgggcatattatggggaacgctgtgtggaatactttgcagggaaaaagggactgattccttatcgtgtgttatatatcgccgtagctgtgatcgccccggtagtagcccttgatgtagtatgggacatcgccgatatcctgaacgccctgatggcaatcccaaacctgatcgccgtactgctcctttctccagttattgtgaaagaaacgaaaagatacctggataacctggacgcgaaagatgatacggagattccggtgattaaaaaatagcaaaagatgatgatgagtaaataagcgagcatataccgattattttgtcgtggtgtatgctcgttttttggcttgtatgatggagattgtcgtttaactgtaaaataataatattcgtctgtatacaaataaagtccaatgaattcccattgatgaaacatctcaaaagagctatactataatagaacacgctgctaaaacttccttaagtgaaggcaacaatagttttttacaatttttttataatggagaacaaaatgaaaactacaaatcaacaaccggcaactgtacgaacatccccaagatggaagcagccactgatatcgacaggctgcgtacttttcgcatcgttactgatgtctgtcaacatcaaatctttcgtccgggcgggaaatctgattccgggaggatttaccggtttatcacttttgttacagcgtacggcggaaacatttttcggaatttcattgccatattcggtgatcaatattgcattgaatgcgataccggcgatcatcggttttcggatgatcgggaaaaagtttacctcatatacggtactgatgatcgtactgaactcttttctggtcgatctgatcccggtaacgccgattacatatgatccgcttctggtgtctgtatttggcgggattttgaacggaacagcaatctcgattgctttgttcggaaaagcttccagcggtggaacggattttattgcggtttatctttcctccagattgcataaaccgtcctggaattttgtttttggtatcaatgtggtgatacttacgaccgcaggttttctgtttggatttgaggctgcgatgtattccatcattttccagtttgtttccacacagacgatcaacacacttcacagaaaagatcaaaaagcaaccatgttcattgtcacccgtcacggagcaatgctggagcagaagattatggaatgtaccaggcatggaatcacacatcttgccgttcagggctgctatctgaaagaggacaaagacatgctgtacacagtactgggagaagatgaggtgaaagaagtgactgcactggttcacagcctggatccgggggcatttatcaacattatcaaatccgagggaatcgcgggaagattctatgaggaaccgttagaataaaagaataacaagaactttgaatcgttacagaacagttatcaaaaatgctcctgggattccaggagcatttttgaaagaaattatttactcagtcgaattacattccagctgtgtttcccaaagacggtctgtaatttaccattttccagtttggtagcagaagagagtgtcggagctactgtgttcggagcggcttctgtattaaccgctttcagatcatcgttggtcagaacgatatgttcagctactttgtaaccttcaaactgtctcaggtcacagctgacttccatatcttcttccaggctcttattcacagcaaagattgtcagagtatcttcttcctcattccagatgcatacagaatccagatacggagcttctccgtaagttttgctttcatataccggggtgtgtacctgggtgttcagaacagtacctcttccgtatacacttgcgtggaaatacggatagaaaatagtctgtctccatgcaccggtgtcagaagtcatgatcggtgcgataacattgaccagctgtgccaggcaggcaatttttacacggtctgcatggcgaagaagtgtgatcagcatacttccgactaacagggcatcttcaaaattgtagatatcttccagctgatggggtgcctggatccatttttccagtttttcatctgcttcgttgctgtgataccagacattccactcatcgaaggacaggttaatattctttttgccgtgtttctttgctttgacagcatcgcagatacttacgacacctgagataaaatcatccattcctttggaacttgccaggaaatcaggggtatcatcatcacggtttccgtagtactgatgcagggacatataatcaacctcatcataagcctcatccagaacggtgtattcccaggaaccgaaggttggcatatccagattggagcttccgcaggctacggtctcgattgtaggatccatgaatttcatcagacgggaagtctcagctgcgattcttccgtattctgcagctgttttatggcccatctgccacggtccatccatttcatttcccaggcaccatactttgatatcgtgcggatctttgtaaccgtgttcttttcgcagatcactgtagtaagtgccgcctttgaagttacagtattccagaagattcttggcatcttccggtccacgggttcccagattgacagccatcatgatgtcgcttcctgctttttttgaccagtcggcgaattcatttaatccgaactgattggtttcgatcacaccccaggcaagctccggtctggatggtcgtttgtcttttggtcctacgctgtcttcccagcggaaaccggatacaaagttaccgcccggataacgaacgatcggaacctgcagttctttgaccagatccagggtatctttccgaaatccctgtgcatcggagttcgggttgccttcctgatagattccttcgtacacggctcttcccagatgttcaataaaagaaccgaagatccttttgtctaccgcgccggtgaggaaatatttgtctacaataatttcagcttttttcattgtaaaaacctcctgtggttatataatgtgctctcgacatgtattgtctgtactgtatatgattgtaacagaacatgggaagaataccagatgtttttgtccgaagtaattgactttttttccggtgtcaggtatgctttttgtagaaaatacgagagggtgatgaagtaatgatttcagatatttccatacagttttgcgaatacaaccgctccaacccagatgctgaccggatctaccgtccacaggggagcggcgattatttgtttttattgctgaaaactccgatgaaagtttatcaggagaatggtatactgattaccggagaaaatgcctgcatcctgtacacaccaggacggatgcagcactatcaggcagtacagaagttccggaacagttatcttcattttgttgcacaggagaatccggcagaatattttcagcttccgcaaaaccagatattttatccgcaaaatccggaagaaatagaagaaatcatccgcaagctgcagcaggaatacatcacccgcggttctcatacggaagcaatgcagagtgcactgatctgccagcttctggtcacggcagcccgtggacttgaaaaagggcagcgacataacccagaagaagaagggttgtaccgggattttcaggcacttcgcatggagatgctccgccattatgaaaaacactggacaaccgaacaactctgcaatcagataaacctggaaaaaagtcagttctacgcttattaccggcagttttttcacagtaccccacacaacgacctgctacaggtccgtcttgacaaggccaaaaatctactgacaaatgaagcactgccgatccaacaagtggctctttcctgcggatttcgaaacatctctcatttcagccgatattttaaacagcagtgcggttgttcgccaaaagactggatctccagcgtttctcctcaatgaaaaatcactgtttaccgataacaataatcgaaagaccagtggatcattttataaggcaaagtcacacaaaccgcacaatatatggtacaatgtaaaaaaggaattctgtataccattctatttgctataatcagaagaaaggagactacgcttatgaaaggaaaatggctttttgcttcactgctcctcacagcagcattgaccatgacatcctgttctttcaaacttccggtcgacttacccttcaagattccattcattactgcagatagaaacaccaaacaaaacgacgaggatccatctgacccggaaaaagccactgatccgataataacggacgaacctgaagttcccgaaaatatcgataccacagaaaacactccatcaggtaatgatcatgaatccaatacacctgatgatgctgatccttctccgtcacaaccagatgaagaccctgttgatacgccgtccggtcaggagaattctgtggacataccagttctcatgggaggtgctcttccttataccggtatgatttctataataaatgaaaattatgaagacgggactcactgatatgacgatatgttagaagacgggatgtcttgcatcgttgactattgctatgtcaacccggaagatcttccagacactccggaggcatacgcaacccttgcagcagaaaaactgaccgacggtggcatatataacattctttccgtttaccaggacgatggttatactgagagtctttcctatccggtatatattgtttcctttaccagcggaaacaacgaggataccaatttctggctggcatttatggttatacgggatggatatacgtacctgtatgctcccagcgtatcctgcaatgcggattataccgcggaagagctcggacaagatcttttcccacgtctgtttttttccgattcgatggacaactgatgctatgaaaaagcacctgactgttatatgttactgttatgtaccgtggcaatacttttctttgagagcagatggcttttcccacacaaatatgttacacttaaccctgtagtaatattaactgggaggtagaaaaactatgactgagcaggagagaatgaaacaggggtatgtatggcaggatgatgatgaaaatatgagtctgcaggctcacacaaaagcactggtaagagaattcaacagtatgccgccggaagatatggaaggaagagaagcacttcttcacgatattttcggaaaagtaggaaaaaatgtatggatcactccaccgcttacagcagctgttggaaaatatgtatccatcggagacggcacctattctaatatgaatctgacactgatcgatgactggaagatcaccatcggaaaaaatgtgttgatcggaccgaatgtaaccttgtgtaccaccggacatcccattgatccggaacaccggggagacggaatgtattcattcccaatcaccattggtgataatgtatggctgggagccaatgttgtcgttcttccggatgtaactatcggagaaaattccgtgatcggtgccggttctatcgtaacaaaagacattccggcaaactgtattgcttttggaagtccatgcaaggtatatcgtgagatcaatgagcacgataaagaatactattttaaaaaccatcgttttgatgagcagccataacgagataaaatatgcttcgcgaatttatacgagtggtataaattctgtgcattgcgaggtgtgttaccgggaatggagtgaacagtaacactttggcttgctgcccgtgtaaataacaggaaagccttgacaaacactgtctttgcagttaaaatattttatgttttataaagtatacgacctggaaggggaagagtaaaagcggtatcgttctttcagagagctgtcggttggtgcgagtcagcagaagagagctttgaactggccccggagtcctttttccgaaacattttcataatttatagaagatgcaagtaagaaaaagcgggagttcccgttacagaatccataagtgcatgaggcttatgcttcatgaagtagagtggtaccacggaaataaagtcctttcgtctctagttgaaaaacagaaacaaaaggactttttatatttcaagcaatacctaggaggaagaaaccatgacagtaccttataatcatagggcagtagaaaaaaaatggcatgatatctgggaagaacacccggtgaatgtggatgatggcaaaaagccaaaatattattgtctggacatgtttccatatccgtcaggaaatggtcttcatgtcggacactggagaggatatgtaatttctgatgtatggagccgctacaaattattgaacggttactatatcattcacccgatgggatgggatgctttcggtctgccggctgaaaactatgcgatcaaaatgggtgtacatcctgcaaaatcaaccgcagacaacgtagcaaatatcaaacggcagatcaacgagatcgcagctctgtatgactgggatcgcgaagtaaacaccacagatcctgagttctacaaatggacccagtggatctttgtaaagatgtttaaagaaggtctggcttacgaaaaagaattcccgatcaactggtgtccatcctgtaaaacaggtctggcaaatgaagaagttgtcaacggaaaatgtgaacgttgtggttctgaagtaactaagaaaaatctgcgtcagtggatgctgcgtattacaaaatatgcagaccgtctgttgaatgatctggacaaactggactggccggaaaaagttaaaaagatgcagagtgactggatcggtaaatcttacggtgcagaagttgaattcccggttgaaggaaaagacgagaagatcactgtatacaccacccgcccggatacccttcacggtgcaaccttcatggtactggctcctgagcatgccatggcaaaagaactggccaccgatgaaacaagagaagctgtggaacaatatatctacgatgcatccatgaagtctaacgtggatcgtctgcaggacaaagaaaagactggtgtatttaccggatcttatgcaatcaacccgttaaatggtgcaaaagtaccgatctggctgtctgattatgtactggctgattacggtaccggcgcgatcatgtgtgtacctgctcatgatgaccgtgactttgaattcgcaaccaaattcaatattccgatcattcaggttatcgccaaagacggaaaagaaatcgaaaatatgacagaagcatataccgaagcttccggaaccatgatcaactccggcgaatggaacggtatggaatcttctgtactgaaaaaagaagctccgatgatgatcgaaaagatgggtatcggacgtaaaaccgtaaacttcaaactgcgtgactgggtattctcccgtcagcgttactggggcgagccgattccgatcgttcactgcccgaaatgtggaaacgttccggtaccggaagaagaacttccgcttcgtctgccggatgtggaatcctacgaaccgacaggaaccggtgaatctccgctggctgctattgacgaatgggttaactgcaagtgcccggcctgcggcggacctgccaaacgcgagaccaacactatgccacagtgggcaggttcttcctggtatttcctgcgttatgtagataataaaaacgataaagaactggtttccaaagaaaaagctgacaaatatctgccggtagatatgtacatcggtggtgtagaacatgccgtactgcatcttctgtactcccgtttctataccaagttcctgtatgatatcggagctattgattttgacgaaccattccacaaactgttcaaccagggtatgatcaccggtaaaaacggtatcaagatgagtaaatccaaaggaaacgttgtttctccggatgatctggtaagagattacggatgtgactctctgcgtatctacgagctgttcgtaggaccgccggaactggatgcagagtgggatgacagaggaatcgacggtgtataccgtttcctgaatcgtttctggaaactggtacaggacagcgcagaagcaaatgtttcagaaactaaagagatggtaaaactgcgtcactgcctgatccatgatatcacagaacgtctggaaagcttcagcctgaataccgttgtttccaaattcatggaatataataacaagatgattgacatggctaagaagaccggtggtattgacaaagaaactctgtctacctatgtaattctgctttctccgtttgctccgcacattgcagaagaactgtggcaggttctgggtcatgacacatccgtatttgcagcaaaatggccggaacatgatgaagacgctatgaaagatgacgaagtagaggtaccggtacagatcaacggaaaaacccgtgcagtcatcagtattccggttgacatttccaaagaagatgcaatcgcaaaaggaaaagaagccgttgctgacaaactgacaggtacaatcgtaaaagagatctatgtaccgaagaaaatcatcaacattgttcagaaataattaaaaacagtaaaagacaaggaggtctgcattgtatttggcaggcctcttttgcatatcacgggataaaggaggatgttttatgaatacgattgaattactggatgcgctgcagctgaaagccaagaaagacccggaacttcgaaaagcactctttgcaacccgcagtgagaagaatcctgtcgatgctttctgtaaaaaatgtcaggaagaaggttatccaatctatacgatggatctgattcaggcaggggaagagttttatgcttccatgcgtcgcagtaccaacggtgggggagaaaattcgccaaaactggaaggcgaggacgatttttatgaattatttttcgccactctggaaaattgagaacatgatatgatatctggcgtgttttgtcattggaaaatgacatgcaatttttctgataatatagtagaatttgtcgttttcaccgaaattatttgttaacattcgtttaagtttcacaaagcagttgctgtttttgtgaaaacatgttacaatctatataactttttaagtgacaaaaataaagataataggagtggtaaataatgtatcaggaagaatacaaacgctggttggcagcagatcttgaggatgctgatctgaacccggaactgtccaggatcgaaggaaacgatgatgagatcaaagaacgtttcgcggtcgcattaaaattcggaactgctggtcttcgtggggtcctgggagcaggtaccaatcgtatgaatatttatgtggtccgtcaggcaacacagggactggccaactgggtaaaaacacagggcggcacacaaactgtagccatcagctacgacagccgtctgaaaagtgatgtatttgcaaagactgctgcaagtgtactggcagccaacggaatcaaagtcagaatctatgatgctctgatgccggttccggccctttctttcgcaaccagatattacaactgtaatgcaggtatcatggtaactgcttctcataaccctgcaaagtacaatggttataaagcatacggtccggacggatgccagatgacagatgatgctgcagcaatcgtttacaatgagattcagaaaactgatgttctgaccggtgcaaaatatatgtcttttgcagcaggtgtagaagaaggactgatccgtttcgtaggagatgactgcaaacgtgccctgtatgatgctatcgagtccagacaggttcgtccgggtctgtgtaaaactgcaggactgaaactggtatacagtccgttaaacggttccggtctggttcctgtcacacaggtactgaaagacatcggaattactgatatcaccattgtcccggaacaggaatatccaaacggttactttacaacctgcagttatccgaacccggaaatctttgcggctcttgaactgggactgaatcttgcaaaagaatccggtgctgacctgatgcttgcaacagacccggatgctgaccgtgtaggtatcgctatgaaatgtcccgatggttcttatgaactagtcagcggaaatgaagtgggtgttctgctcctggattatatctgtgcaggacgtatcgaaaaaggtacgttgccacagaatccggtagcagtaaaatctattgtatccacaccgctggcagatgccgttgcaaaacattacggtgtagaattgagaagtgtcctgaccggcttcaaatggatcggtgatcagattgctcagctggaagcagcaggtgaagttgatcgtttcatcttcggattcgaagaaagttatggctatctggctggtccttatgtacgtgacaaagacgcagtcatcgcttccatgttgatctgtgagatggctgcttactacagaagcaccggaagttctctgaaagcgagactggaagagatttacaaagaatatggtcgttacctgaacaaagtagacagctttgaattcccgggactgagtggtatggataccatggcaggtatcatggaaggactcagaaagaatcctctgaccgaaatcgcaggcaataaagttgccagcgtaacagactatgaaaaaccggaagaaaccggtcttccggcagccaacgttctgatctacaaactggagaacaacgaaaccgttatcgttcgtccatccggtacagaaccaaagatcaagatctattacaccacactgggtaaagatctggcagaagcagaagcagagaaagaaaaactggcagaagctttaaaaccgatcatggcataaggcaacgaaaaaatacgctgtacaaatgggtgatatatgctctaagtgacttcttaatcatgattttgtcatggttagtgaagcaatcacttagagcatttttgtttcaagaggtacagccatgagaaatgaaaaaattaccccactgtacgagcgcctgagccgggacgatgagttacagggtgagagcaactccatatccaacccaaaacagatgttagaggattttgcccgccggaatgggctgcccaaccctacgcactttaccgatgattgtatctcaggcacccgttttgaccgccccggatttttggcgatgatggaggaagtggaggcagggcgtgtagaggcaatcgtcatcaaggacatgagccggttggggcgcgactatctgaaagtcggtcaagttatggagattttgcggcagcgcggcgttcggctgattgcgatcaatgatggtgtggacagtctgaaaggcaatgacgattttaccccgttccgcaacatcatgaatgaattttacgcccgtgataccagtcgaaaaatccgctctgtgtttaagtcaaaaggcatgagcggcaagcacctgaccggtactgtgatttacggctacttgtgggatgaaaagcgggagcattggattgaaattgcggagttggaaaaggctgttactggatacgaacagagccagaaatcagcggagaaatttatagccctgattgataagtatgagaattttgacacgctgacaaacaccatgttgcctcacatgatggagactgcgggtgtcacggaagaactgaaagcctgtgaccctatgcgttgggtggggctgatgaacacattaacggcacagattgaggaaattttaatcagggaactgatttgcagttgaatgggaggtgcgggaaatgctgacctttgaaaagattttgaaagtgtttcaggcatatctggatgatgatccactgtatgaggtggttcagactagccacggttatacattgatggcatgggaaccccaccggaatgactggtacagcgctgaaatacagaaaaccccggaggatttacggaacgctttgttgggtacatacgccaactttctggaagataagattactggaaatgaccgtgacctgactgtgacagaaaccggagaaatccagcagaggtgccggaaacttttggaaaagtgcagggatacatgatacagaaacgccaaaaggaggccgcgattatgcgtcctctttctgcttcgcagtctgttccattttgagcgccccgtctatggcaccttcgataatcggcaggtattcttcagggcaaagcttcagcttgtggctgacccgttgccgctgttcgctttcttcccgcatgatctccgggttaaaataccgttccacgggaagtccgcagaccttttgcaacacagaggtaacttataattacaataatctttctaaatcttgagttctccataatagatacatatttctttgctataattgaatgttaggaggtagacttatgcagaaaattttagttgttgaagatgatattgacattcaagatatattaaaaaaccatttgaccgatgcaggatatgaggttgtgattgctgacgatggtgtagacggaattgcaaagtttgatgataccattagtcttgtcctgctggacatcatgctacccaagattgatggctatggtgtatgtgaggtcattcgccaaaaatcgcaagttccgattattatgcttactgcgctctcggacgaagaaaaccaactaaaggggttcaaacagcagattgacgattacattccaaagcccttttcgcccaaaatcctgctgtgcaagattgcggctattcttcgccgtaggactgcggaaaatcaaaatcaatccctgcttacttataaagagctgagtatggatgttgacggattccatgtatatcaaggcggaaacgaggttgttttgaccagcaaagagtttgcgcttcttaggcttatgcttgaaaatcagggaaaggtctttactcggcaaatgctacttgaccgattgtgggcggacgatttggaggtcgaggatcggatcgttgacagtcacataaagaacattcgcaaaaagttaaatgctgactatataaaaacaatcagaggggtgggatacagaattgaccaagcacattaaacaacggttatccgtcaagatttttataattacacttcttctactgggtgcagcttgtagcggaacatatctcttcatctcaaagctgttacctacgacatattccaatctgataaatgcggctacggagaaagccgctatgcaccttgttgagcaaatgacagcctttgacaatatatctgattgtgaaaatgatatatctaatttttcaaaggaaacaaatgccgctttttggattgaggatagtaacggccgtataatatatccagacgaggcatcaatggaaacttctaatacttcggcagattacacagttacattcgatgaagatgaatcgttcatagatatgcaaccgtctggggcaactacgacaaatttttaccccttcacgctaaaaaacggtactgcttatacattggcagttcaaacggatttgttcgttgtacagcaggcaacaaaagtattgctgtctatacttccgtatgtcatcctaatggtctttctgctttctctcctttgtgcgtggctctatacacggtatatcactcgacctattgtgcgactgagcaagatttcaaagcaaatggcagaactggatttttccggtcaatgtagtacaggacgagaagatgaattaggttgcttggcacaaaatctaaattcattatctgcttcgctatccactgcattgaacgaccttcaaactgccaaccaacagctcaaaacagatattgaaaaggaacaggcgttagaaagacagcgggtagactttttctcggcagcatcccatgaactgaaaacaccactaaccattttaaaaggacatttggcggggatgctgaacggagtcagcggctatgaaaatcacatggagtacatgaagcgttcgcttgccgttgttgataggatggagaagttggtaaaagaactgctgtatgtttccaaagcggaggaaactcaaaaaactgaatataaaaccgttgattttgcggaaatacttcgggtacaggttgccgcagtagcagatttattggaagaaaagaaacagcatcttgaagcaaatattcctacccgcctttattgtgaagtggaacaagcacagatggaacgggcaattcaaaatatattggtaaacgcaattcgctattctccaagtggtgaattgattcgtatatctttgtccgaaacgcatggtacgatttgtggtgaaattgaaaacacaggtgtccgtgtgcctgacgatgctattccacatttgtttgaagccttctatcgggcagatacatctcgtaaccgcaatacaggcggaaccggattagggctttatattgttcgcaaagtcatggaaatgcaccgagcaaattacggcatttcaaatataaacaatggtgtactgttttggtttgaattgccttgtaagcagccggtagacaactccatctaaaatccataatccatgcaaactatatacaagttgctttgttatattatagctgtcctcaagagggtagctacaatttttagaaagtgagggtttatcaatgaagaacaaaaaaatttggtcaataggactgtgtggagcaatctgtttaagcattacaggagttacttatgcaagttatgcaagtgcattggcttcggatacaccaaaggtttcaacatacgaaacagtaaatacatccggtaaagatattctctatcaggatacagtcggtggacagatcagtgttgacggtaaaaattgggtcgatgaggcagattatgagaagaacaatgcagcaccagatgtgcagtggtggacagctgatgaatatgaggcgtggatgaacgaacagaaaaaagaaatggaatctttgattggaaccggagatggttggtatgatgggcaaggcgtattccacgaatttacgcaggaaagcgtagatgctatgatggacagctataaggaaactctggaaagtatcaaaaagggagtattgtattccaaagacgacggtgacggcgatacctactccatgattccacctactgaagatgtagtttcctcttatagtgttgatgtaacaaaagataacggaaaaacagtacacattggggattattccacagttgaggaattagacaaagccatttctgatgcagttaaaaatggtcaactcacacaagaagaagcggactccattcagaaataatgactaagccattctgccggacgacggcaaaagaaaaaagccgtcgtagagcagacaatttgacacgcccatttgaaccggcggctttgattttcagagccgccgtttctttttgtctaccctaaaccaacgacgccctaacaccgtgtaaattcacggcggcattgggatggccgggagtttgacgagtacatcattaccaccgagggtgtaggggtctacggtgaaacgccggaggaatacctttgccgcatggtaacgctgcatgagctgatggctgttctggacacctgtaccgaggcccagcagcagttgaacactccccgcaccggcaaaatccgggctttgcaggaaagcgctgcactatttagcattttacaggcaaacggcatccagtctatgcagcagcttcatgaaaaaaacgctgatatgaacagccgttactatgacctgcggggaaagatcgtcaaggctggacgccggatcgccattcttaccgaacgtggggagatgtgggaacagtttgagcagcgccacagccgggaactgatcctctatgacgcagcaggccggtatctgaaagaactgaaagacagcggcgaggcaatcaccccgaaggcatggcagcgggaaatcgaccagctgaccgccggaaagcagacggacacgcttgccatgaaatccatgcgggaggatttgaaagcagtggaacagttccgcaaaaccgccgagcagctgtcccgacaggaacgggacaagcctcacgaccgggagccggatcggtaaaggatactgcattttggcgtacccctgtcaagtgcgtcgtatttcacgacatacttttgcacacagaaaaaccgccgtacaggtttccccatacggcggcaggctgtttatttgccgaacaagtcgctgtgtgtgccggtgcgggccagcgtcagcaccagaacatcatcttctatgcggtagacaagcagccagtccgggagaatgtgacattcccgatggcctgcccaatcgccggacaggtcatggtcacggttcttatccggcagcggttcgcccattgccagcaatgctacgacctgctccagcacctcgatcttcaagccacgcttgatggctcgtttgtagtcttttttgaaactggtcgtgtacttgacggtatatttggtttctttcatcttttcaggtcagcaaataactcgtcaaggtcattgtagccctttacagacgggtcttttgcaatcctttccgcttccagcatggcagcaaccgtttctttgttcggctgttccagccttatttcaaagggaatgccgccttcacgaagcgactggcgcacaaagatgttaaacgccgtagtcaggttcatgccaagttcagtaaacagtgcgtccgcttgcgctttcaaatctgcgtccatgcggatactgatgtttgtggtatttccagccatacgatcaacccctttctgctggcaattatagtatatgccatttgcacgaagaaaacaatactttgcacgaatatttaacaataaattcatttaagaaggttaccggctttatgaaagaaaccagggaaatctgtattgccccttttttctgtttagataatttatataccgaacggtaaataaataactggatttctgtaagaaggtgtggtattataataaaagtaaatatactgtgatcacaaaggtactgaacagttaaataaattgtagaaatagaggtgcattcacatgagttggtacaatgaagctatattttatcatatttatcccctgggtcttacaggtgctccggcacagaatgactatggtgctccggcacatcggttgaataccttgttgccatggatcgatcatatccagaagattggatgtacagcactgtatatcggtccgttattcgaaagcgttggacacggatatgagactacagattataagaaactggattcccgtctgggaaccaatgaggatcttacgaactttgtagctgcctgccatgaaaaaggaatccgtgtgattttcgatggtgtcttcaatcacaccggacgtgatttctttgcttttaaagatatccaggaacaccgggaacgttcccgctatgttaactggtattgcaatgtgaatttctgcggaaacacagagtataatgatggtttttcctacgaaaactggggaggatataatcttctggtaaaattgaatcagcgcaatccggaagtacagaattatatctgtgatgtgatacgtttctgggtgtctgaatttgatattgatggtattcgtctggatgctgcagatgtcctggattttgactttatgcatgccctgcgccgtactgctgatgaagtaaaagaggatttctggctcatgggagaggttatccacggtgattacagccgttgggttaacggcgatactctgcacagtgtaacaaactatgctctgcataaagccctgtacagcgggcataacgaccataattattttgaaatcgcacataccgttaaatatttgcagaatatgggtgatctggatctttacaattttgtggacaatcatgatgtagaacggatctataccaaactcagcaacaaagcgcattttgcaccgattcatatattgttgtatactctgcctggtattccgagtatttattacggatcggaatttggaatcgaaggaaagaaagaaaaattctcagatgcaagccttcgtccggcactggatctggaaaattacaaaaatgccgtcactgaaaatccatgtacagcgctgattgctgcactcggaaagatccgtcaggacacaccgacattaagctatggaaattataatgaactgatgcttaccaaccggcaatatgcttttgcacgggatctggacaatgtacgtgtgattgtcaccgtcaacaacgatgacaatgccacagatatgaatctgcctgcaggtaatactgccatatatatcggtgcactttccggtaaccgggcagaagtacagggtggaagaatccacgtgacgattcctgcgaacagcggcgatatctggattccggaagaacagttgaagaacgaaactccggtcccggttgcaataatgaaaaaagtaaaaccggtaaccgtaaaagagcagaagacatcagaaaatgaaaccattgtctttgaagagaaaacagagcctgcaactgctttgaaaacagattggagtaaaacaccggacgagatgacggtatccgaacttcaggcggctatccttgagaagatggccggaaacggtccggtgaccgatcagatgaagaagaccgtagctgacaacatctggcatgattcactggtaaactggctgaagagttttcattagatgtgtaacaatatataaaaagtcgaaactgaaatcacttttcgtgaatttcagtttcgactttttatatattgttacagacctctgtcattgtatctgttccaatgctttccgaagctgtaacggatgtggcatgtcaagagcagcctttttcaatacgtcctcttgtacaaatacctccgaaggtgtaccgtctgccagtaattgtccatgggcaagaactacaactcttgaaaaacactgtgctacaaaatccatatcatgaagaatcgccaataccagttttccctgctcggaaagactggcaataatgttccgtataatctcttttccactgtaatcctgtgcaatcgtcggttcgtccagaataattacatctgtatccatcgcaagaacagaagcaatcgcaaccagtttccgttgagagagttccagatcatacgggttttcacccgcatagggagtcaattctgtcagtgccaacgcttccatggctttttccatggctttttcttttggcataccgatatttaacggaccaaacataacctcatcaatgaccttgtacttgaaaatctggtcatccgggttctgaaaaacataacccacctgtccggcaagagaggccaccgtacgcctggaaatatcttctccctggtagaggattgttccggcagaaggctttaacagacctttcagtaaacgtaccagtgtggtttttccggcaccattttgtccgataattgccgtagggcgctgatccagagacaactggaagttttcaaaaataggatgatcttcggtataggaaaacttaagatttctcacatcaaatcgattttctggtgcttctgtcaggacagtatctgccagctgcggaagtgtaacctttctttccttatctcttttcaaagcttctttcacatcctcaacaactacaggatacgtaccatccggacgaaaaagatgctgttcgacacaataacgggttacatagggaggacaaatacctaattctgcaagatcatgtcttgagaagatcttttccggtgtgtcaaaagcaatctgcttaccttcatgtaagagtaatattttttcacagtaagatgccagtttctccattttctgttcaatcataaaaatagtaatacctgtttgggcaagtaactctactgtatggaaaacctcttcgcttccctgtggatccagctgggatgtcggctcgtcaagaagcagaatctccggttccatggcaagaacagaagcaatggccacacgctgcatctgtccaccggacagatcaaatgggttcttctcccgaaactgccagatgtccagttgatgcagaaccttatccagacgttcctggatctgttcagccggtacgccaaagttttccaacccaaaggctacttcatcccaaacagtatctttcgctccggaaagctggttaaaagggttctgaaaaatcagcccaacttttttgcaaagttctgcggtaggtgtggcagccgcggagatcccgtcaatcgttactttaccgccgtaagctcctttataaaactgaggaactagtccgcagaaagcctggctgagcgtactttttcccgcaccattctctccgataattccaatgaattctcctttctcagcagtaaaggagatatcatccaacgccagctttttcgtatggggatagcgatatttcaaatgttctacttctaaaaaagccataaataaatcctccctgccagtgccagaatcaaccctgcaatacacagccagctgaagatccggtctgcttttgtcttctgatggggatgcatccaggtttttaatccttttgcaccaaatccacgtacttccaatgcgattgcccgttctctggtagctgtcagcgcactcataacaaccggcgagatcagtggaagaaacgccttaatacgaaccagaagattaccttctgtttccataccgcggcttctctgggcatcggtgatggtatgcatcgtccccatcatctgcggaataatctgaaacacagaattgataatataaccaaatcgcggagaaaatccctttcgctccaactcatccacaagctcggaaggacgggtggataaaacgacaattgcgaaagacagaagcatattcagaatatttaatccgatatgcgctgcatacaataatccttctttataaaacctgagaaatccgatggcaaacagtacattcttgttctgttgattgaccagaccatgaatcagaaaaattgtaagaataattgtaaaagaaaatgcaatcagcggcagggcttttttaataagcctgccgctttttaacagtgcaaaactgattatgatcatcgctgcaaatccccacaaagaaccagtcagaagggggatgcagattgctgctgccagataccataacttggtaaatggatgaagctgtgtcagccagcttccgttatttgtgtataaactgatggttttcataaattaatccagactttcgatcgtttcttctgtatcatacagagtggtaagtttctttggaagacctttgaggatcaggtatacgatgatcagtgtgatcagcttatccggtacatccacaacgatctcatccaacagagaacccagtgccagtggaagttttgctgcctgtgttgcggcaaatactgcatcaccccatacatttccggttgtaccgccccagaacaggatgttcagtggtgtagaaacaacaactgcagccagaccgccaccgcatgcggttaataaagcctttggaaaactcttcataaatcccagacgggccatgataccaaccacaaggccgataaagagactggtcagtgcataaaccaaagtaatattatcaccggtggtaaatccgtagatcaggttgtttgcggcaccacagatagctccgatgatcggtccgccaagtgctgcaccgatacaggttccgatgctgtccagccataacggcagtttcaggaaactggcgaacagttttccgagatagttgattccgatacatgccggtatcagaacgatgacggcggcattcagttgtgttttaaaaatctttttcatgattcatcctccctcgatgtaattttttatctgtatcatcagaaatgtaggatacaaaagttgtataccatctgttttcggatgattttcagatattttggttttgattattcctggattctggtgaatgcttccaacgctgtgagaatttctctttcttccccactcatggaaattgcctctttggcggcatattttccaatatcttccgcgacagaggactgagaggcggcaacaacatttaaaatcgatgcagtacgcacacctcgaagggaaccgagtacaaataacgctgcggtttccatatcagaagcaattgctcgttttccggcccaataactgtaaagttccgggttccgatcaccataaaggcagctgtgactgcgacagatccccaggtgataaggaatattttcagcaactgcactttcccggcaggcacgcaggagatcaaaatcaggtatcgcaggatactgtgcttccacataagcagcagaggtgccatcgtcccggatcgccccggttacaaagatcagatcgcccagagcacattccggctgcagggctccgcagcttccgatacggatcaggttatgaacaccacactggatcagttcctccacagcaattgcacaggacgcagcacctattccggtggaagtaaccaacatttttttgcccttatatgtaccctgccagctgcgaaattcccggtttgatgcaagcagtctggcatcttccagatgagaagctaccgtatctgcccgtgccggatctcccggtaacagtgcacagtccacatccagatccttcggaagacggatatgcggcatcaggttttcagacataatcaaaaccttctttcttaaaaatatttgcctgtttaccttaacactttacagctgtcttgtcaattgtaaatataaagcaatgggatgttctgcaacaggttactgagaatgaggtaaacagtaacgcgaacagaatccgataagaataacagtagttacgaatagcataagaaaacaggattgacttttccggcagatgtctttatagtgaaattcaggtgactgtgagtgtacggaacagttacaaatttagaatctttgttttggtgatgagatagaaaagcagaatatctaataaaaggagatttgtatcatgaatgatttattattagtaatcgatatgcaaaatgtataccttcccgaccagccatgggcatgtgagaccgtggcgcacacaaaagcaaatatcctgaaacttctggaaaagcatccggaaaatcagacgatcttcacccgctatatcgccgccgaacacccggttggaatctggaaaacctataacgagctgaatcgcaaaattaatgaagatccctggatgaatgaactgatggacggaatcaaagaagcagccgaagcgtaccctatctacgacaaaagcacatattcctcctttcaggtacccgccatccgtcaggctgcgcgaaaagccgaccgcatcattctcaccggcgttgtctccgaatgctgcgtcctttccactttctttgaaggcattgacctcggctgcaaactcatctggctcaccgatgccatctccggcctgaatccaaccctggaagccgaaaccctgcatatcctgcaaggtctttcgcccctccacgtagaattcatgaccacagaagagtacctgcacagctgttgaattaccatacctaacagattttccacgcttaacgacagttttcaatatttcacccaaatacaaccttcaactcgttattcacgtaaatcaaaatagattcactggattatatattgatatgcaatgcaaaaaaggatgcgtgtggcgtgcttcgataccgggtgaaacatccgcatccatctattgtaactctttataagaagtattacgaaaaataaaagaaagtcaggaagatgaagttatttggatgaaaaaagaaaaacaacagccagatgtgctaaacatttccagcgtgcagttatgtgaactcctgaaaaaagcaataccgatagtgatagaagatgtagaaatgaattgctattacgtgaaacgtgaaatcatgtttgactataacgatgatgttcatttctgcggtgtgaagtatgataagaaaagggcaaagaaagaaaagagaataacattttcaaaagaacttctgtcggtatatctggataaacaatcatttcccggcgtaattgaattatatcgttatggtcagctagatggggaatcactggctgatatttcacatggtatcattgtatcgtcggaatatcgggaagcgttgtaaaagtaaaaacagcagtaaaggaaagggagggacaagagtggtaaatggaataggaaaatttaataatgaagaacgcattcttctcaacaatatctgtaaggatgaaagccttaccaaactcacaaaagaggatgtaaaaacttcattgatgatttcccgtgaaatcgtgaatgatgatttgatggtgggactcattgatgatttattagacacactggaaaatatgccggaacaggaatggaaacagacaaaaatgttgcttccatttccggttgttgaagcggacagcgtggttgtacagccggatgatgatttgatgtaaaggttgcgtaaaaccgcatatgaaaatatgcggttttatcataggataatatcctcacggtgaggacggaaaatggctttcaaaagccgttttgttacgataaaccattaatagataaagatacatgttgaaattaacaaaggaatgtcatgtttttgtgctgaaatgcttgcagattctgttcaaatattgtatactcttttcacggtgtattatacatacaatacagtccgaaaacaaaaatatgcttacaaaaaaacaaagatgaaacacacaaaaaaaggtggtaactaaatgaaaaagaacaatttgaaaaaactgaaaaaagggttagcgatgtgtctggcatctgctatgattacatcttttgcgcttcctgcacaaaccgaagccgcaacatggaaaaagaataacactggttggtggtggcaggaagataacggaagctatccggtaaataaatgggtaggcgttaagggacgcttatatcactttgacggaactggttatatgaactatggttggtactgggacggtagtagttggtattacctcggcagtaaagaagacggttctatgaagacaggctggcagtatgtgaacggtcagtggtatttcatgaacaatgacggtcggatggctactggctgggtagctgtaaaaggcaaatggtactatatgagtggcagtggagcaatgctttacggctggcagaaaatcggaaacaactggttctatctcggtggagcaaatgacggctctatgaaaaccggatggcagttcatcaatggtgaatggtattacatgaacggtgatggcgcaatgctttctaatcagtgggtaggaaactactgggtagacggttcgggagcatggacaaagacaatggaagcacctcgttgggtgaaatccggtagccgttggtggtacagacatggagacggtggttatcagacaaacggctgggaattcatcaatggaagatggtattacttcgataatgccggatggatggtaacaggctggaaacaggtaaatggtagctggtactacatggatgcttccggtgcaatgctggcaaatcagtgggttggaaactattacgttggcggcagtggagcaatgctcacgaatcagtgggttggtaaatattacgttggaagcaacggtgcttgggtaaaagataaacagccagagcatacacatgaatggattccacagacaagttccatcaatcacccggaggaatcccatcaggaacttgttaaagaagcgtggtcagaagaagtacaccatgatgcagagtacaagaaagtggtagataaagaagcatggacagaaactatcgaccacccggaggaatcccatcaggaacttgtacgggaagcgtggtcagaagaagtgcaccatgatgcagagtacaagaaagtggttgataaggaagcatggacagaaaccatcgaccacccggaagagtcccatcaggaacttgtaaaagaagcatggacggaaaccattgaccacccggaggaatcccatcaggaacttgttaaagaagcgtggacggaaactgtaaaccatccagaagagggacattatgaaactacagtggatggatattgggaatatatttaccatgaagcagagggagataagaaagcctatacagagagaaactttgtagacggctatacaaaagaaacggatgcaaatggtctggatgtagagattccggtattcgaaaatgttgcaaaaaacatctgcaatcagtgcggtgaagatattacaggaaatgaaactgctcataataagaatcatttgttgaatggtggaacaggtggttggcatacagagtatcgtatgcttcagacaagaacggaaacaaaacattatgatgctgtttggattgtagataaagaagcctacacagaaaccgtcaatcatgatgccgaatataaaacggtggtagacaaagaagcgtggacggaaactatcaatcacgatgcagaatacaaaaaagtggtagacaaggaagcatggacagaaaccatcgaccacccggaggaatcccatcaggaacttgtaagggaagcatggacagaaaccgtaaatcatcctgcggaatataaaaaagtggtagacaaagaagcatggacagaaaaagtgacaactaataaatgttcttgtggggcaacaaaataattgatacagctatacgatggggctgtcgcactaattagtgcgcagctccttttcttgtgcaaaaaaataactgccagacctcgaaagaatccggcagttggtgtaaaatcaagttatgctactaactaaattattacaaaaagattatacaaaaaattcagacggatatcaacttaaacttccgttaaatcttgaaacaatcattccggataatgattctgttcgattactaagtcagtttgtggaggctatggatttgactgacctatattctacttatgaaagaataaattctgtatcgcccagaacacttttgaagatcgtgctctattcttacatgaacggggattactcctctcgttccatggaactaaattgtaaaagagatatcaattttatgtttcttctagaaggttccccggctcctgatcatgcaacatttgcaaggtttagaagtatccattttgctccctgttctaaacgtatccttgcagaaatgtctaatgcattgtttgatatgggagaaatttccggagagaccatttttattgatggtacaaaaattgaagccagtgccaataagtatactttcgtctggaagaaggcagtaacaaaaaaccaggcaaaacttttgcagaaacttgctgattttgtggctgagtgtgagttgctttatgatataaaaatcgtttatggaaatacgataaaaataaggcatgtaaagaagctccgcaaaaaactgtatgcattaaaagaaactgaaaatatagtgtttgtgcatgggatcgggaaaagaaaaacttcactgcaaaagagtattgaaactcttgaaagttatttgaaccggctcaaaaaatataaccagcagatacatatctgtgcggaacgcaacagttattcaaagacagatcatgatgctacttttatgcgaatgaaggaggatgccatgggaaacggacagttaaagcctgcttataatcttcagcatggcgtggattctgaatacatcacatggcttaccataggtccccagcctactgataccacaacgctgataccatttttgaaagatgcacaggagcatttgaaattcaaatataaaaacataacagcagatgccggatatgaaagtgaagaaaactatctgtttctagaagcaaatggtcagctttcttatataaaacctgcgaactatgagatttccaagacccgtaaatataaaactgatatcggtaagatagaaaatatggagtatgatgtaaaaaaagatatctatacctgcaaaaatggtaaaaaattaggtgtagatcatatccgccactcaaaaagcaaaacaggatatgtaagtgaaaaaacgatttataaatgtgaggactgtaatggatgcccttacaaaagcgaatgcatcaaagggaataactgcaaaacacccttggaagaacggacaaagacacttcaggttgcgaaaacatttctaaaacatagaaaagaagatttagaccggatactctcagaagaagggatcctcttcaggacaaaccgaagcatacaggcggaaggctcctttggcgatttaaaacaggatatgcagttccgcagatatttgagcaaaggaaatgcaaatgttcttgcagaaagtacgttgcttgccatggcaagaaacataaacaaactgcataataagattcaaaatggaagaaccggaacacatttgtttcgataaaaagtgcctaaattttgacttatcaaaacaatttttcaagccatcaagaatggcttattaaagacgcactttaataatagactgtagcaatgaaaacgttttttgatggattttatccttaaaacagcaaaaaaggaagctgccgcttcacgaaaattcattcgttaaagcgacagccccttttttaccatcatccgtttaacatatccctcttctgaccatacattatgctattcctttaatcttgcaataaccagcaagccagaggcagatgcagggtggaacaacactttgtgggcggttagggcaagctttaagatccgacacttacgtagacttaggctcgagcgctctcgcgagagtcttagtcgaagttagtggctagcttaaagttgccctgcccacgttgtttcaccctgcatctgcctctggcttgcgtccggtcaattcatctttaaagaaaaaacaataatatccctttattctccacgtttcctaggatactttttatccagccgtttttcccgtctgcgcaacatccgtttccgaatccccgccacaatctgcgaaatatacctcaacaacggctccgtagcaaccgcaaacacgatcagcgtcatacaacactttcgtgtcatcactccaattccaaacagattcttcaaaaagatcacacagaacaacaatccagccaccatagccgaccacacgatccagcggaatacattcatcggtttgctgattttaaacagaatcatcagtccgacaattgcaagcagaagagtagcagccgtggaaatttcctcgtttgacattccaaacgtctgcccgaatactgtaaggaatcctacaatcagtacatccgtaagtccggccggaagcgcttttaaaagcacattcgtaaggaagtgtccttcaatcatcttcttgttcggttccattgccaacaggaatgccggaataccaatggtaaacatggccaccatggaaatctgagatggttccagcggataggtgatcataaacgccatagaaaacagcgacagcagaaagctgaaaatattttttaccagaaacaaacttgcagatcgttcgatattattaacgacccgacgtccttccagtacaaccgaaggcatacacgaaaaattagattccagcaataccagctgagaagcctgtgctgctgcgtcacttcccgaggccatcgcaatactgcagtcagcgtctttcagtgcaagtacatcgttgacaccatcaccggtcattgcaacggttttccctgcttctttcaatgcacggacaaactgtcgcttctgatccggtgtcacacggccgaaaaccgtatattttaacactgctcgcttgatatcatccggtgtttttaactgactggcatcgatgtaattatccgcattggcgattcccgcctgagaagctacttttgatactgtaaccggattatcaccggatataaccttgatatccacaccctgatctgcaaaatactgaaatgtctcccaggcttctttacggatcggattggccagcaatacaagaccataaggaaccactgcttctgtcagtgcttttccgtccggagttccctcgtatcgaccgaaaaccaggacacgataaccctcgcttccataagattctattgtttctttatatatttcataatcatcccgaagaacaaattccggtgcaccaagcacataagaagtcgtatgaaaagtaacactgctgtatttgaaagcggaagagaatgaagttactgaagtagctacctgtccgcttccctgtgtaaaatattcctgcattgctgccattgtaatgttatctttcgacatagcgtgggcaaaatcacccagcagttctttcaatgggggaagttcttctttttcatatggttccagagaaaccacatcatgaaccttcatggtattttcggtaatggtaccggttttatcaacacacagcacattgaccctggcaagcgtctcgatacacttcatatcatgtacaagaacttttttcgtggccaatcgcattacactgactaccagagctacactggccagcagatataacccttccggaatcataccaatgatggccgcaaccatagcctgcatactggtcttgatggaactgtcaccaagcagatattgctgtccaaaaagaacaatcccaatcggaatgatcagaaatccaacaatctgaaccagtttatccagggaacggatcatctcagactgttccccttctttggttgcctttgcttccagtgtcagttttgagatataagagtctgcacctacctgttccagtcgtccgagacaggaaccggaaacaacaaaacttccggacatcaacgtgtccccgggttttttggtgatctcatcggattccccggtcagaagggattcgttgacctgtacctccccgtcaatcacagtagcatcggcacagatctgattccccgcctgaaattttacaacatcatccagcaccgccttttctgcgggaatcgtctgaagctttccttcacgcacaacagtagctttaggcgcattcaacacactcaacttgtccagtactttcttggaacggatctcctgaataataccaatcagagtgttacagataatgaccgggagaaaagtcagatcacgaaatgcaccgaccagaagcagcagaactgcaatcacaagaaaaatcaggttgaaatacgtaaatacattgctgataataatttctttggtcgtcttggaaggagaatccaccggggcattgctccatcctttttccatccgttctttcacctgtgcctgagtaagtccggtatccgcggttgtctcaatccgtgcaaccggttttctcaggatctttgtttcctgagaatcctttgttttcttcaatggcgttgcctccttttactgtatctgttgaagtcccgtaatgtccggttcgatcagaagggagtagtttgtgtaatatacaacaaatcccggtttcccgccggttggcttccggagatttttcttctgtgtataatcaatttccaccttcggtgcctgtctgcccttggaatagtaagctgccagctttcctgcttcttcaaaggtgcgatccggaagttcttcattttttgattttacgatcacatgggatcccggctgtcctttggcatgaaaccaccagtcattgccggaagcaaacttaaaagaaagctcatcgttctgaaaattatttttgccgacatagatatcatatccatcgctggaaatataatgatatggacgagaggtgacttttactttttttcctcctgtatttttccgctttacatatccatattccatcatttcttctttgatctgtacaagatcttcttccgatgaggcaatatcaagagaagcggcaatggattccagatgcttgatctcatctccggtttcctgcaacagtgtatccagtgcttccttggttcgctttaacttgctgtatttatcgaagtatttcttggcattttcctgtggggtcatcgtttcatccagtggaatctgaatcatttcattggtgtaataattcaacgcctccatggactttgcaccaagctccacttcatagccgtaagtattcagcagctctccccagacacggtatttttcttttttctctgtatccttcagctgtttttgctgtaactgatatttttttacatttcgctccagggcattctgtacgatttttcgcagatctactgttttctgacgcatctttgtgacaatatttttttcagcataatatgtctctaacaccgggaagatcgatggataagagacagcacggtaatcctgatactgagacagtggaaagcaggcaaattctaccggctcttttcctttatatataatgtttggttcgaaatgcccgtccctgatgtcatctaccatgcgaagaaaagtatgtgccagatgtacccgctccacatcctcaagtccgtcggttggaataccgccatcgatgccggcgcgatagcaaacttcttctgccatcaaaggactgattcccgtgatagaagtgtagattgcttttgccacattcacaggacgcggaaaaatcttttcctgaaagatttcttccgttaatacaaacggattcagttttgactgtgtttccggtataaaatacggacgcccgggaaggacttctctcacagaactcatatgagctgacacatgtttgatactgtcgatgatctgatcctcttcgttacagaagataatgttgctatgttttcccatgatctccacaatcagatatttggtacacagatcaccgagctcattcagatgttcaatagtaaaacggatgatccgctccatacccggctgttcaatcgcgatgatcttgccactcccgatatgctttcttaacaacatacagaagttgggtgccgtcagtggacttggtttattagtttccgtcagataaatcagcgggagagaagcactggctgataaaaacagacggtattgtttccgctgatttttaatggttatgatcaactcatcattttccggctgggcgatcttgttaatcttaccgccggtgatggtctgatttaattctgttacaatatttgcaattgtgattccgtcaaaagccataaaaacacactccttctttgaatatttttattataacagaaaaaaaggatttgactagggttttgtaatgacttataataaaaacatatgcatattaagcaataattaagaaattatttaaggtgagaaaactattatgattaaaagcatgacaggatttggaagagccgaggcacaggacgagcagcataaatttacggtcgaaatcaaatctgtaaatcatcggtatctggattttaacattaagatgccgaaaaagctcagctttttcgacagtgcaatccgtacactgttaaaagagtacatgctgagaggaaaggtcgatatctttatcagttacgaggattttacacagtctcacatgattttgcagtataatcaggacgtagccagccagtatatggcatattttaagaagatggcagatacctttggtatctgtaacgacatcaccgcagcggagcttggcaggttccaggatgtatttacaatggaagaagtggattcggatgaaaaagaattatggggacttctggaacaggtactccggaaagcctgtgaacagtttgttgagacacggaagacggaaggggagaacctccggactgatcttttgcagaaacttgatcagatgtttgaaaaagttggaatggtggaggagcgttcaccgcagattctccaggagtaccggcagaaactggaagataagatgaaagaactgttaagcgatacacagattgaagaaagccgaatcgcgtcagaggttatcatctatgcagacaagatctgcaccgatgaagaaacagttcgtctgaaaagtcacatccgtcatatgaaggaagtactcgccgatggtgaaggcattggccgaaaactggattttattgcacaggagatgaaccgtgaggcgaacaccatactgtccaaggcaaatgatctggaaacatccaatctggcaattgacctgaaaacagagattgagaaagtgcgggagcagattcagaatattgaataatccgcagaatgagggcacgcaatggccggttttattaatatcggattcggtaatatagtcaaccgtgacaaaatagttgccgtagtcagtccggatgctgctcctgtcaaacgaatggtgcagcaaggaaaagaagagaagatagtgatcgacgctacccagggacgacgaacaaaagcagtacttgtcacccaggaaggatttctggtgttgtcggcattacagccggacactatcggaaagcgtcttcatgcagaaaaaattatagaagaaaaaggtgatctggatgagtaaaaaaggaagtctggtaattatttccggtttctcaggtgccggaaaaggaacagtagtcaaagaactgatgaagaactatgaatgttatgcactgtccatctcggcgactacaaggaatccgcggccgggagaagaaaacggacgggaatatttttttaagacaaaagaagagtttgaagaactgatccgtcaggatgcgctgtatgaatatgcacaatatgtagataattattacggcacaccgaaagcttatgtagaagaacagctggctgccggtaaagatgtcattctggaaattgaagtgcaaggtgccttgaaagtaaaagagaagaatccgcaggctctgttattattcgtaaccccgccatctgcggaagagctcaaacaccgtctgatagatcgtggaacggaaaccatggacgtgatcaacgaccgtatgcgccgtgctgcggaagaatccgagatcatggatcattatcagtatctggtcatcaacgatgatctggatacttgtgtaaaggaagttcaccagctgattcagagcgagcacctgaaggtctctgagaatcttgatctggttgctgatatacaaaaagaactcaaagaaatgaaaggagaataaattatgatacatccatcttatacagaattaatccaggcagtaaacaaagacgttgaggagagcgatactcctgtatgcaacagcagatattccatcgttcttgctaccagcaaacgtgccagacagctgatcgcaggtgcggaaccgatggtaagttattcgctgaataaaccactttctatcgccgtagatgaggtttataaaggaaaagtaactatcatcccggacactgaagatgtagaagaagctgaagcagaagcagctcttgaaaaagaactggaagcggaagacaaaagcgcagaagaataatcaggtcaataagaggggatgctgcatgagcgtgctggcatctcttttttaaccaatggaaaggatttattaatctatgtatatatttttcatgtctctcggatgtgacaagaatctggttgattcagaagagatgctgggggcgctggtaagccatggattcgaagtgaccgatgatgaatcgcaggcagatgtgattgtcgtcaatacctgttgtttcatccatgatgcaaaagaagaaagtattcaggcgattcttgagatggctgactataaaaccaaaggcaatctgaaagcattgattgtgaccggctgtcttgctcagcgttacaaagaagagatcacaaaagagatcccggaagtagatgccgttctaggtactaacagtcaggcagctcttttagatgccgttgatgaagccctgaaaggaaaagtaagtcatgtatttacaccactggagggcataccgcagatgcccggcaagcgtatgatcacaaccggcggtttttatgagtatctgaagatagccgaaggatgtaacaaacactgtacttactgtatcattccgaaaatcagaggaaactatcgcagcgttcccatggaaactctgattgagcaggcaaaacagctggcagaacagggcgtcagggaactgattctggtagcccaggaaaccaccatctacggaacagatctttatggtaagaaatcactgcacctgttattaaaagagctctgtaagattcccggaattgtctggattcgtgttctgtactgttatccggaagaaatctatccagagctgatcgagacgattcgtgatgagaaaaaaatctgtcattatctggatctgccaatccagcacgccagtgataaaatcctgaaacgaatgggaagacgtacttcaaaacagcagctgatcgacatggtttctactcttcgcagagagatcccggatattgtccttcgaaccacgctgattaccggttttccgggagaaactcaggaagatcatgaagaactgatggaatttgtggatcagatggaatttgaccgtcttggtgtatttacgtattctccggaagaagatacaccggcagcaactatggaggaccagattccggaagaagtcaaacaggatcgccaggcagaacttatggaactgcagcaggaaatttctttggaacgaggagaaagctgtgtgggaaaagactatctggtgatgatagagggaaaagtagcagatgaaaatgcttatgtgggacgtacgtacgcagatgcaccgggcattgatggttacatgtttatcaataccggagaacttctgatgtctggtgattttgtaaaagcacacgtaacaggatccctggaatatgatttgataggagagattgcagatgaatacaccgaataaacttacgatgcttcgtattattttgattccgttttttgtagtatttcttcttggaaattttagcacctggtccaaatggatggcacttgctatctttgttatagcaagtctgactgatatgctggatggctatctggcgcgacgggataatctggtaactaattttggaaagttcatggatccactggcagacaaactgctggtttgttctgccatgatctgcctggttgatatgtcccggatcccgagctggatcgttatcatcatcatcggacgcgaatttgttatcagtggtttccgactgattgcttccgataatggcgtagttatcgcagctaattactggggcaaatgtaaaactgtctgccagatgtttatgatcatcattctgattgcaaacctgggtggtggttttgtgattgtggagcagattctgatctatgcttctttgatcctgaccgtgatttctctgatcacatacctgtggcagaaccgcagtgttctttccatgcaggaatagaatacaacaactgaaaattataaaatataaagaagagatatttgtggagtaattacagatatctcttctttttaaatcttccgataattttatcgttttatcccctccgaagcattttcatcatcgacaagatccgatccatttttgcaatttcctgtgatgattttcctttttttaacacctttgtaatcatatccatctctccgggactgaactgcagtccgtttttctttgaattggctgctgcggacattaaaaatgcaagcatttcgttctgattttttttacttccctgttgtatcagagactgtaacagtgccatcttggccggatcaattccttccagtgtcgaatccttcatccattcctgagtcataaaacttttacctccttatccaagcggatctgcaggttcctgaggcatctgcaaaatctccagtgcgtgaaaggcaaataagatctgatcaatcatttctttctggctttcacctgcatacgttcgaagctgctgcagaatatccagtggctgcgaagctccggactcttcggacatcatcatcagttctgcaggacctccggaaaacattgcaattgtatgggaaagttccatcatttttgcatacaaagcaaaaacccgctgtacatctgccggaaaataagggacggcggctttcagcatctgtaaagaatcctgagccagcatctgatccagaggtgtcatcggagctatatggtcttcattcatataatttccccgttttttctactatcttatgcttcacatcggaaaaagagaagccggctgcataagatataagcaggaatgtgacttttgaaaggaagtatccggtatggaaaatcgaaaaagaaagacgcaaaaacttgttattgacggaaacgcactctacgaactggatatcgaatgtctggagcgaaaaccgaaaggaattcccttgcaatccaccagaaatacccctataatagaacaggcaaaaaataatacaataagaaaaaggagacgttatgacaaatcaaacaaatgatgtgattcgcgatgccaaacaactcggaatccccaaaatgttgatccttggtctgcagcatatgtttgccatgttcggtgcaaccattctggttccgattctggtaaacagctattttacagatgcctgtggcgaaggtccgacacacggactgaccgtcgccgtaactctgttctgtgcaggtttcggcactctgttattccatgtgtgctccaggttccaggttcctgcatttcttggatcttcctttgctttccttgggggattttcaacagtagccaacctgaacaccggtatgtatgcaaccatgagtgttaatgacaaagctgcgtacgcctgcggtggtgtggttgtagccggtttgatgtatctggtgcttgctctgatcattcgtctggtgggcgtaaaacgtgtgatgaggttccttcctccggtagtaaccggaccggtcatcatctgtatcggactgactcttgccggttctgcgatcaacaatgcttccaccaactggtttctcgcacttgttgctctggccgtaattatcatctttaacatctggggaaaaggtatgtttaaaattatcccgatactgatgggggttgtgatctcatacgtggttgcactgatcatgaacgcgatgggaattaccaatccggacggctctgccatcctgaacttttcttctgtaagtactgcaaactggataggtcttccgccgatgcagttcgcaaaatttgacgtgactgccatcctcgttatggctccgatcgctatcgcaactatgatggaacacgtaggtgatatgtctgccatctctgcgacggttggaaaaaactttctggcagaacccggacttcacagaacactgcttggagatggtcttgctacagctctggcaggccttctcggcggaccggccaataccacctacggagaaaataccggcgttctggaactgagccgtgtacatgatccgctggttatccgtatcgctgcatgctttgcgatcatcatcagctttatcccgaaagtatccgccatcatcagtaccatgccatcttcaatcatcggtggtgtcagctttatgctgtatggtatgatttctgcaatcggtgtgcgtaacgtggtggaaaacaaagtagacctgaccaaatcaagaaacctgatcatcgcaggtgtcatctttgtctgcggtcttggattcagcaatggtatcacttttaccatcgcaggcactccaattaccctgacagcacttgctatcgcagcaatcgcaggtattctgctgaacatcattctgccgggcaacgactacgaattcggtgtcaatgaagccggagatgaaaaccgtggaattcatgcaagtacaggtaaaaaaaatgcataatatgacaacagaaaaattattttctttcattgaaaacagtccgactgcatttcatgcgatcgaagcgatgcgatgcagactgaaggcagaaggctaccagccacttcttgagggatctgactggaacttgcaggcaggtggaaaatactatgtgatccgcaacggctcatccatcattgccttccgtatcccggcaaaggagtggaaaggctttcagatcatggcaagccacagcgattccccgatgttcaagattaaagagaacccggagatagaggcagaaggacattatgtaaaactgaacgtagagaaatatggcggtatgctctgcgctccgtggtttgaccgtccgctgtccgtagctggccgcctggtagtgaaagacggagagcagattgtcacaaaactggtggatgttaaaaaggacctggtgatgataccaagcctcgcgatccacatgaaccgtgatgccaacaacggcgttccgtttaatccgcagaaagaactccttcctctgtatggagatgaaaacgcaaaaggaacctttatggaacaaatggcagcacttgccggtgttgcccggaaagatattctggcacacgatctttatgtatacagccggactcccggtactgtatggggtgcttcgggagaatatatttcctgcggtcgtctggacgatctgcagtgtgcattctcgtcactggaaggtttcttacaggcacaggacggagaaagtattccgcttcactgtgtctttgacaatgaagaagtgggaagttccagcaagcagggggctgcttctacattgcttcgcgatacgttgatccgcatctgtgaagcaatgggaaaaaaccagtccgcttaccgaagatatctggcaaacagctttatgatctccgcagataatgctcatgccgtacatccaaactatacagataaggcgtgtccgaccaaccgtccgtatatgaatggaggtattgtgatcaaatacagtgccaatcagaaatatactacagacggcatggccgcaggtatcttccaggaaatctgcaaacgggcagatgtaccatatcagacctttttaaaccgttctgatatggcaggtggctctacccttggtaatatctccaacacacaggtagcgttaaataccgtagatatcggccttccacagctggccatgcattcaccttatgaaaccgcaggaagtgaagataccggatatctgatccgtgctgctgcctacttctttgagagttcgatctgcgagagtggttatggaagctatacaatcaaacacatctaatcatgcatgcgacatgctgatataactattctatattgtcaaaaggcaggtgcgtaaccattgaacgtacctgccttttagtacattgcataccaggatttccgatctcttttccccggactcccggcaataactgtcacgtgtcatcctttgacttaattcacatcacactattatgtagatatacgcctgcggcagggaacagacaccgcaggcgcagggaaataatacggttattaacgaaacgatgtactagagtgtttctgaaaaatcatttccgcaatctgcaagccccactttgcggtatattttaccctcattcggataaaatttcccacaaagtgggactcgcagctcacgaaaagcctttttcagacacgcttagaagcagccgtttccgcatccgccgcagcacagaaggatcagcagaatcaggcagcagttgttgtcattgtttccgcagccacagccatcattgtttccgcagcaagccagaaggatcaagatccagagaatgcagctgcagtttccgtttccgccccagaaattaaacagtccgtttccattgcatccattgttgcatccgccgttacatccattgttacatccacagtcccgttcgcatccacagtttgtagcagtgatatcactcattgaagtattcctccgtttaggattgattacacttcatcttatggaatggacatacagatggttacggattcaccaaaaagtttttaagttgtggaaatcgcacgaaacacctgataaatgtccagagttccatatccccattcccggttgggataaaaaagatccggattcctgattgctccgcgaatcagaagattcttcatctcataggttgacagatagcggggaaccggcaatttctgtccccattccatcaaaagagcacagcttcccgctgtcagggcagcagcaacactcgttccgtcccgctgtacataactgtccctgattcccggtccggacaccttcacccccggggcacaaaggtccggcttgacctgttgatttcttgtatagccacggccggaattgagatagatacttttgctgtaagcatcgtaagcccctgcggtaatcacatatggggaatttcccggtgctgtgatggttgtataaggatccggcataagaaagctgatattcgaagacacaaatccacttatgggaagccacagatggaattcacttctggtattaccggatgcatagacctgtatcgtccagattcccggtgtgggcataacaaaacgaagaaaaataagctgactgccggaagtactctgtattacttcataatatagttcaatgtgggtacgatcaagaaaaaacggaatattctgcatctgtccaagccttgccggtatccgcggaattatctccccggaaggagagcgaaagcctaccgagaacagttccggtggaaagccccacagttctgcaaagaatccaggacagccctcgggaaccagaatttccacagatgcgggctgggtatatcctgtaacattaccaaaataatgatgtgcctttcctgcttcatttcccgctgcagtaacgcagacaattcccggaaccatatccagtctctgtaaagtgagatcaaggggggtatatcccatatgatctccctggttactccccagtgccagacacaacactaacggcagcttgaggcgttctgccagttccacaagatactgaattcccgtcataatatcattttcctgatataccggtttctctccggaataaaaataaaaattttgaagcggctgttttgcttcctttagcttcactgccgcaatctgagcctcattggctgctccgatgaattcctgctgccggttttcacttccggcagctacccccgctataaaggttccatgtccttccggatctgtcaccggcacaagggaaagaggattttccaggtttactgcctcttggatctgttctgccgtatagacggttccatacccgaaaggtccgtccccggtggaagagggcactgtctgatcccagatttccacgatccgcgtctgtccatctgctgataaaaaagccggatgcgtataattgattcccgtatccacaaatcccagtaacacattttttccatgaagattcagccctggttgattttgtgtctgcaggattccgctgacttccagactggttgtatccagaggaacatacagattcggaaccagactgtacacaaaccgtatattttcaagaagttcattcggccgaatcggtatatggatcactacaaactgatcgttgatcacagtaggttcatacggagcaatgatctgctgatagaattcctcgtcaatttttccgtatggaaggatcagatctattctgtcatttgcatagatagcatcctggtgctgactcatatcatacctgttggtcttttttttactatatgcaccgtttccactttccctttcaccttttatatcataccatagaaaaaaggccggattttctatgtacacaaatacatggacaggaaccggtattggcgttgccattttagataccggactgtatccccatatcgattttggtgaacggatccggggatttcaggattttctcggacaccgtccttacccttatgatgactccggacacggaacacatgtggcaggaattcttgccggcgacggaacagccagtgacagacgctatcagggtgttgcacccgggtgtcacctggttgctgcaaaagtactcgacaggcgtggaaacggacgcttacaggatgttttacgggcactccagtggatctctttcaatcagaacctctatggaatacgaatcatcaatatttctgtgggcgctgccgcaatggattcaaaagctgccgcacgactgataagagcagtggaacaggcatgggatcagggctttgttgtggtgaccgcagccggtaatatgggacctgcatatggaagtgttacagccccgggcagtagtaagaaagtgatcactgtgggagcaagtgatatgctggaccggatcagttctgtctccggtgccggtcccacagcagaatgtgtctgcaaaccggatctggtggcccccggggcagatgtgatctcctgtgccaacaaaagaaacagctatgccatcaaaagcggaacatcgatgtccacaccaagagtttcgggagctattgctttgttgttacagaaagatccttttcttacaaatgtggaggtaaaaatgctgctgcgggaatcctgtttggatctcggatatccaagaaaccgccagggatggggaaaactggacattcaaaaacttcttgcactctaaacagacatggcaccaaaaacagaaggtgcagggattcaagcagttataaccatcgaaccaccttgacataaaaagtccgtgaatgacctgaaaaccgttttcaggtcattcacggactttaatttacgcgagcaacgagccaaagtccatgcttgcacgagaccttggcgttgctaagcgccagtggcgcttgtttagcaacgaccgaaacggagtgtagaggccgcgataactatgagaaactcgcagagcgtgtttctcatagtttacgccagttcctcccattttgcatacagttcttccagtttctctgcaattgctgccttttcttttgaaagccgcacacattccgccacattgacagcaacctccggctgtgccatctcttcatcaatctcaccgtctctggtttccagcttttctatttctgcttctgtcttttttagatcattctcccgttttcgaagtctcgcctgttcttctttctgctgtttccagtcaagtttggttgcagatgctgaaacatccgcaacagcttcttcctccttcggtgcataaatctgtgtcagttcttcttttttctccagatagtagtcataattaccgatataattgaccattgcctgatttgtaagctccaggatccgggtcgcggtctgattaatgaaataacgatcgtgagacacatacagtacagttccggtatagtgtttcagcgcctgttccagaatttctttggatacgatatccaggtggttggtcggctcatcgagaatcaggaagttcgcttcggaaagcatcagctttgccagagaaacacgaccacgctcgccaccgctaagagcactgatcagtttaaagacatcatctccggtaaataagaacgcagccagtacattgcggatttctgtatttgtcagataaggatactcatcggagatttcttcaaagattgttttctccatatggagtacgtgatgttcctgatcataataaccgatctgtactttactacccagttcgatttcccctgcatccggctccaccagaccatttaaaatcttaagaatggttgtcttaccggttccattggcgccgataatcgcaacacgttctccccgtttcacagaaaaatccacgttggagaacagctcctgctgaggaaatgctttcgccagattttttactgttaatacatcgtttccgctgactacacgcggcttcagttccagatgcatttcgacattttcttccaccggtttatccagcacatcgatcttatccagcattttctcccggctctctgcacgtttgatggatttttcccggttgaaagattttaattttgcaatgacttcttcctgatgcttgatttcctgttgctgattcagccatgccttatattccgcatctcggatcattgcctttttctctgcatacgcagaataattccccataaaagtacgaacatgtccacgatcgatttcgactacttttgtcacgacacgatccagaaaataacggtcatgggagacgataaataccgcgcctttatagttgatcagatatgtctccaaccatgcaatagattccatatccaggtgattggtcggctcatcaagaagaattatatccgggttggacaacagcagacgtccgagcgccacacgggttttctgtccgccggataatgtgccgatctttcttgaaaaatcttcttcctcaaatcccagaccttttaatacacctacaacttcactgcggcaggcataaccaccttccagttcaaactgatgagtgagacgggagtaggaagcgagtagttcatccagttcccgtccggtcaacgtcttcatctgctgttccatagtgcggatcttttcttccatgtctaatagatactgtttgacagaaagcagctcgccgtagatcgtattgtcgccactgacttcctgatgctgtgccagataaccgagtgtcttccctttggcaactatcacctcaccggaatctgccggcatctcctgcataatgatttttaacagtgtggactttccggcaccattcggtccgatcagtgcagccttttccctttcctccagatgaaaggacacatcctttaaaacatcatctgttacaaatgatttattaatattctgacatgataaaatcatgaaaaacctccttaaatttcacaagtctatcgaatattatacatgaatgaagaaaattcgcaagaaaatcacaataaaatcaggaagtttatttgacaaacttttcacacttaactataataatattaatatgatgcaggaggaaagcagcgtggaggaaaaagacatatcaagagcagtcatcaaacgtcttccccgatattatcgatatctgggagaactgatggaagatggggtagaaagaatctcgtccaatgagttgagtgggcggatgaaagtgacagcttctcagatccgacaggatcttaataattttggtggattcggacagcagggatacggatataacgttaaatatctccattcggaaattgcaaaaatccttgggctggatcgcacacacaatatgattatcgtaggtgccggtaatctcggtcaggcacttgccaattatacacagtttgaaaaacagggatttaaaattgtcggaattttcgatgtgaatccggtcatgcagggagtttctgtgcgcggcatcgaaatccgtatgattgacgaacttcctgagttcgtgaaggataatcatgtagagattgctactctgaccctgccgaaagccaaagcccttgatatggcaaaactgctggtggatgtgggagtaaaagccatctggaattttgcccacacagatctgaatctttttatgccggaggatgtgatcgtggaaaatgtacacctttcagaaagcctgatgcgactttcctacaatctgagccgttttgaaaaagatcataaacaggaacaaggcaaaatttaacaacagcaaggctgctgccaacagagggcagcagccttttatttacgtgagcaccgggccaaagtccgtgcttgtacgagaccttggcgttgctaagcgccagtggcgcttgtttagcaacgaccgaaacggagtgtagaggccgcgataactatgagaaactcgcagagcgtgtttctcatagttttacagaaagtgagatcatagctatgcagattttagtaacaggaaaacagatgaagcagcttgaccagtctacgattaagcagatgggcattccttctctggttttgatggaacgggcagcaatggcggtatttgactgtctgaagcaacattttccactgaaaaaaacattggttgtatgcggttccggcaataacggagcagatggcgttgcagttgcaagacttctgcatctggcaggatatccggtagatctttatctcgccggaaatcacacatccttcacggaagaaatgaacattcagtggcaggcagctaaaaattatcaggtatcgatagtcaacaactgccggttttctgaatatactactattgtagatgcactttttggtgtcggattatccagagaattgtccggaaaataccaggctctggcagagaaaatcaatgcttccggcattcccgttcttgcggtggatattccatccggcatccatgcaggcacgggacaggttatgggcaccgccatccgggcaaccgaaacggtcacctttgcataccgtaagcttgggatcagtctgtaccctggatccgtctatgccggacatattcaggtgaaagatgttggcatctacggtgcatccgaaggcattttttcactggataacaaagatgtttcctggcttcctgtgcgggatcctgccggcaacaaaggaactttcggaaaaatcctgttgatagccggaagccgtaatatgagcggggcagcttacttttcttcgaaagcggcacttttaagcggtgccgggatggtccgtatcctgacggatgaaagcaaccgtatcatcctgcagcagcagtttccggaagccatgctttcggtttatgaaccttccatgtcaccggatgaactgtcagaagttgtcagaaaagctatggactgggcagatgtggttgctgttggtccggggctttctacttccaaaacagcggagaacttgttgcaaacagtattgacattccgtcaaagcaagcctatagtcattgatgcagatgctttaaatcttctggcaaaacgaaaagatctgcaggcacagtgcgatgctgcctgcatcctgacccctcatctcggagaaatgagccggctggcagagtgtacgatcagtgatctgaaagtacatccgcagaagtttatggatgtattttataacaactgcccctgtactctgatcatgaaggatgcgcgaacctggattcgaaccgcagacggaagctttttcctgaatctgaccgggaatgatgggatggccaccgcaggttcgggtgatgttttgtgtggggtagttgcaggattgcttggacagggaatgaacccttccaaggcggcaccatttgcggtatggcttcacgggcttgccggcgatcaggccgcctctgccaaaggagcccgttccatgaaagctacagatattctttccggtcttgaagcacagctgcagaaaatggacagtcagaattgaatatacaggagaaaataaattatgaaaaaaaacagtcgggtctatgccgccatccatctggatgcgctggaacaaaacctggaaaacatgaaaaaaaatcttacaccaggaaccaggatgattggtgtgatcaaagccaatgcttacggtcatggagcagttcctgtggcacatcttatggaaggaaaagactacatctggggatatgcggtagccaatgtaccggaagccgaagaactccgcgatgccggtttaaaaaaacctatactgatcctcggttatgtctttccggaagattatcagacactggtgaaactggatatccgtccggcagtgtttgattatgaaacagctgaaaagatatctcaggaggctcagaaagcaggtaaagtacatccgatccatctggcatttgataccggtatgacacgaattggttttcgtcatcccaaagaaagccttcctgagatcctgcggatcagcaaacttccgggaattacgatcgaaggtgcgtttactcattttgcaagagcagacgaacaggatctgacctctgcccatcagcaattcgcaaactatcaggaatttctgactttgctggaagaagccggtattcggattccgatccgtcactgtaacaacagtgcaggaatcctctggcaccgtgagggtgatctcgatgccgtacgtccgggaattacactttatggtatcgcaccgtctgacgaagtcgttaatccgggcgtggcactgcaaccggtaatggaactgaaaagtcatatttctttcgtaaaagaagtggaagcaggagtagcagtaagttatggcggaacctttgtcacaaccagagattctacaagaatcgcaaccattccggtcggttacgcggacggttatccacgatccctctccaataagggatacttactgatcaacggaaagaaagcaccgattatcggcagagtctgtatggatcagttcatggttgatgtgtctgacattccggaagcagttcgcggaacagaagtaacattactcggaactgaccacggcagcacgatcaccgcagaagaactgggtgatctgtccggtcgtttttcctacgaactgatctgctgtatcacaaagcgtgtaccgagaatctatctgtaaaatcatccatgtgtaatgattcagtaccttcacagttatagaaataccttacggattactatctgccgaatagcgaacatccatcgataaatttcttatatacctgcatacaccggataaacaaggaaatactatagatgtcagaaatttctgacagaacataggaatcggagtgtggagaatgtgaatataagaagaggagatatttattatgcggatcttcgtccggtggtgggaagtgagcagggagggatccgtccggtactcatcatccagaacgatatcgggaacaaacacagcccgacagtgatctgtgctgccattacttccaagatgaataaagccaaactgcctacgcacatcgagatcaacgcatctgcttacgacattgtcagggattccgtcattcttctcgaacagctgcgcaccattgataaaaaaaggctgaaagacaagatctgtcatctggatccggaagcccttgcaaaagtaaacaaagcactgaaaatcagtctggaacttcctacataacatggagttgcttgacgaataaatagtaaggtgatatactttttcgggcataactgtgtgcttatgccttatgatcttaataatacgcacagaaaaaaggagtgtatatggatagtagtgataatccggtcgccgggtggatgttatttctgctgtttatagtaatcaacagtattttttacggattcggttccgcgatccagaacctcaatgaaaatgagatagaagacaaagcggaacagggagacaaaaaaagcaaacttctccttcacattatgaatgcccctggatcactgatccaaaccgtacagttttaccatatgttgttaagctttctggtaggttatgtacaactgaaaagcattatgaagacagtatctgtcagtctttctgctaccgctgcaggtgtctttttcacagaaaaccccggaaagatcatactgtgtatactggtactttttgtggatctgattttactggccactttcggcattctggcaccaaaaagaatctgctctcgacatgcagcagcttccgcttatcggatggtacatatggtgcaggcaggtattattctggcctggccgattacaaaattgatggaacttttaaccaatctcaccgtacgcctgtttggtattgatccgaatcacacagaagatgatgtaacagaagatgaaatcattgatcttgtagatgaagcccatgaacagggtatcattcaggagagcgaagcggagatgatccagaatatcatggaattccatgataaatcagcaaaagatattatgactcaccggaaaaatatcaatgcgctggacgatactaccctgctaaaggatgccattgtatatatgtcggaacacagtaattcccgttatccggtataccatgaagatatcgataatattgttggatttatccatatcaaagatgccatggaacatcagaatcgggcagaatatgaagccaaaagcctgatgcagattccaaagctggttcgttccgtcgcttatatcccggaaacccgtggaatcgattctctctttcaggcaatgcagacgaaaaaaatccatattgcaattgttgtcgatgaatacgggcagaccgccggactggtaacgatggaagatattctggaagagattgtaggaaacatcttcgatgaatatgacgaatccgaagaatttatccagccacagttcgatgaaagtattctgatggatggtctgacaccactggatgatgtggaagaagtcctgggtatcgaccttggtgatcatgcttttgaaaccttaaacggatatcttacttcactgctggggcacattccgacagctgaagataaagagataaatgcgaatggatattgtttccagattctttctgttgaggacaatattattcaaaaaataagagtagaaaaaatacaatagaaaaaggagtttatattatgtcaggacattctaagtttgccaatatcaaacacaagaaagaaaagaatgatgcaaaaaaaggaaaaatctttacaattatcggccgtgagatcgtaattgccgtaaaagagggcggtccggatccggaaaacaacagcaagctgcgtgatgtcatcgcaaaggcaaaagcaaacaacatgccgaacgataccatcgaacgcggtatcaagaaagcagccggtgatgccaatgccgataactacgaaatgatcacctatgaaggctatggtccgaacggtatcgcgatcatcgtagataccctgaccgacaacaaaaaccgtaccgctgcaaacgtaagaagtgcattcacaaagggaagcggaaacgttggtactcctggatgtgtatctttcatgttcgataaaaagggtcagatcattgttgcaaaggaagactgcgagatggaagctgatgatctgatgatgatggctctggatgccggtgcagaagacttttccgaagaggatgactgttatgagatcatcaccgatccggacgatttctccactgtccgtgaagctctggaaaaagaaggcgtggtaatggcagaagcagaagttaccatgattccgcagaattatgtggaactgacagatgaaactgctgttaaaaatctgcagagaactctggatcttctggaagatgatgatgatgtacaggctgtatatcataactgggacgaataaaacaatagtattttacgccgggcatggtttcccatgtctccggcgtatttttttgtccataactgtccatactgattgggaacactgacagttcacagaaagtaaaaggagatgccgaatatggacaaacaggaaacgaaacaaaagctacagccaaaagcagaaccgatagataacgctgtccccctggaaagccggattcatctgctcaccatcatcggagaagtggaagggcatgaatctctgggagatcgtaccaaatccaccaaatatgaagaaattcttccgcggcttgctctgattgaggatgatgaacaaattgaaggaatcctgattctcctgcacacggtaggcggtgacgtggaagccgggcttgctatcgcagagatgatcgcatcactcagcaagccaaccgtatcactggttctgggaggcgggcattccatcggtgttcctcttgccgtctctgctgattacagtttcatcgtcccaagcgcgaccatggttcttcatcccgtgcgcacaaatggtatgttcattggtgttatgcagacctatcgtaacatggaaaaaacccaggacagaatcaccggttttatcgccgcgcattccgatatcactcagccacgtctggaagaactgatgcttgatacctctatgctggtcaaagatgtcggaaccatgttagaaggagaggatgctgtcagagaaggcctgatcaacgagatcggtggtatccgggacgcactgaataagctaaaagaactgatgaagaaaaacatatagttgttctgccgatcgattcgtgttaaaatgaggaaacagataagtttatgtattcggaggaacaaggctatgaaacgttgtacagagtgtgcgctgttatttgaaaacagcctgactcactgtccacagtgcggacgacttcttgtcaaagataaaaaaagtccccgcttttttgtaattaccgtacttgccattaccctggcaatactttgcggagttctgatttctttttctccaatcatggctgcttaatttctaaaagttcagattttcatccgaaaagagagacgggagattgtatctcccgtatttttatgatataataatattttgatgtaagagaagcatacaaataaacaataaatgaggataaccatgagtttttttgacgccatgattctgggaattatccaggggcttacggaatttttgccggtgagcagttccggccatctggtcatcttagaaaatttattaaatatccgaacagataccgatgtactttttcatgtgttgctgcactttggtacactgatcgctatttgtctggtttttaaaaacgatctgttccgtatgttggtggaaaccatacatatttttcaggatctgactgccaattttaaaatatatattgataataagatgcataatgcacagacaacaccctatcgcaagattctttgtaacaattaccgcaccatggttgcgatgatcctgatttctacaataccaaccggtatccttggatatctgctgcagaatcttgttgaccggtggagttcttcccttccggtcaccggacttggtctgcttatcactgcagttttactgctcgtagttgacaactggcaattggggaataagctgccaaaacatattacagttcctcaggctctcgctatcggcgtatgtcagggaatcagtgtgattcccggaatttcccgttccggtatcactataaccgccggatttttatgcggttttcgccgcggtttcgccattcgatattcttatcttgtatcgattccggcaatcctgggtgctatgattcttgaatgtggaaaactggaatcaaaatctgtcacctggtctcttggattcagttatacagcaggtatgctcaccgcagctgtcgtcggatatttttccattcgatttatgctggcttttataaagaagaaaaaacttcgcattttttccatctattgttttatcatggggattcttgcgatcgtctgttattttgtgtagagcatatcagataaggggaggagataacatctatgccgtcaacggggacacgaaaaaaaaagagtactgccggaaggaaaacaacccgtaaaaaaacaccttccgctaaaaagcgccagaaacaggcgtataaccgggagctggttacagagatcacgatcttgatcacactggctgtttccgtactgctggtgatcagcaattttgatatcggtggaaaagtaggaactgttatcagtcagttttttttcggactgttcggctggatggcctatctgtttccggtagttctgtttatgggaactgcatttgctatcgcaaattatgacaatgacctgatgtctcggaaactctggggtgtcgcactggcattctggtgtcttactacactgattcacctgtttactctcggctgtctgaagggagatacggtaagcggatattatacttattgttcacagcacaaaaccggcggtggaatcatcggtggtgcaacagcaaagtttttatgtgtttcctttggtactgcaggtgcttatgtgctgatgtttatttttctgatcatctctgtgatcattatcacgcagcatacggttcttgcgccattaaagaaaaccggtgaaaaggtatatcaggaagcacttgaaaatcacgcccgtcgagtagaagaacgtggagtttttgcactagaagagacgaaactgccaaaaggaaaagaaaacaatactgttccggaaaaagaaaacgcgaaagaaaatataaaaaaagaaaaacaaaagcaacgggaagaacgcagactggcccgtgaagccgcaaaagcaaacgcgacttctcccgccatgccggagattcatatcgaacgtcctgcgcctgcccctgtccctgaagaacctgtcaatgccatccggcaggagcttccgtttgatgtacaggaattaaaacctgttacaagcgacgaagtacaggcagacccggatatatcaaaagagcaggatactgttacagaatctcatacggaaaaagccacccgtaacagaaagccgcgttcctcgcaggaagagatagcaaatggtatagaaaatattcagcaggaaatcgccagagaacctgaaaaaaaagaatatgtttttccgtcggttgattttctgaaacgaggcgatcgaaatgcatccggagattctgacgaccatctgcgtgaaactgccatgaaattgcagacaaccctgcacaattttggtgtaaacgtaaccatcaccaatgtaagctgcgggccaactgtgactcgatatgaattgcagccggaacagggtgtcaaagtcagtagaattgtaggactggcagatgatatcaagttgaatcttgcagctgccgatattcgaatcgaagcaccgatccccggaaaagcagctgtcggaatagaagttccaaacgctaccaacagtccggttatgcttcgggatctgttagagacaaaggaattccgagaattttcatctgaacttgcatttgccgtcggtaaagatattggaggaaaaacagttgtcgcagatataggtaagatgccccatctgctgattgccggtgctaccggatccggtaaatccgtgtgtatcaatactctgatcatgagtatcatctataaagccagacccgatgaagtaaagctgatcatgattgacccgaaagtagtggagttaagtgtctataatggtattccacatctgttcattccggtagtcactgacccgaaaaaagctgccggcgcattgaactgggctgtggcagaaatgactgaccgctataacaaattcgcagaatacaatgttcgtgacctgaaaggatataatgcgaaagtggagcagctggctgatatagaagacgaaaacaaacctcagaaacttccaaagatcgtgatcattgtagacgagctggcagatcttatgatggtagctcccggcgaagtagaagatgcgatctgccgtctggctcagctggccagagcagccggtattcatctgattattgctacacagcggccatccgtcaatgtcatcacaggactgatcaaggcaaacatgccatcccgtattgctttttctgtatcttcgggtgtggattcgagaacgattttggatatgaatggagcagaaaaacttctgggaaaaggagatatgctttattatccacagggatatcagaagccggtgcgattgcagggagcttttgtatcagataaagaagtgggaaaagttgtggaatttctcacagacaatcatcagacggatcaggtatatgacagtaagatcactgatatgatgaatgcttctcaaagcagcacttccggatcaggttccggacaggatctggatgcttatttcgtagatgcaggaaaatttatcattgataaagacaaagcttctattggaatgttacagcgtatgttcaagatcggctttaaccgggctgcccgcataatggatcagttatgtgaagccggtgtcgtaggtccggaagaggggacgaagccacgaaaagttctgatgtcgatggaagaatttgatacttatattgaagaatgtttataacatatatttttttaaaggagaataaaaatgagatgttcaaattgtggagagccgattgaagaaggacgacttttctgtttgaattgcggtcaggaagtacaatgggttcctgattatgattcctttggcgattatatggttcaggaaaaactgaaaaaagaaaaagaacaggcagaagccgccgctgccagaaagcgtgcagcgatcgcagctgagaaccgccgtcgaaaaaaagcgaagaagaaacggatgatcctggtatctgtcgccggtgttcttgttctggttgctgccggtttgtttttcaagcttggtatggacaaaaaaaattacaacgattttgattaccagatccgcatggcagatactgcattttccaatcacaaatacgaagaaagctataaatttgtagaacgtgctgtcagtctggatgattcggacgttgatgcaaaacttcttctggcacaggtacaggttaagctggaaaagacggatcaggcaatcaaaacgcttcaggatgctattcgtctggaaccggataaccaatccgcttataatcagctcatcaaaatatatatggaaaatgatcagcccgatgaagtgaaaaatctgctggacagctgtgataatgatgacatactgaataaattttctgcttatatcagtaggaatccggtattcagtcttccagagggcagctatgacgagccgaaaactctttctttatattccaaagaggacgaagatcagatttattataccaccgacggaacagatccgacttcctcaagtaatctgtataccgacagtattgcactcaaagaaggtcagaccattatcaaagcggttacagtgaacaaaaagggaattacaagcgatattgtcagcaaaacatacacgattgcttacgaagctcctgacccgccgcagatttctccgtcatccggaagctttaccacggacatggataccaatatctatatcattgttccaaaaggatgcagagcatattatgcatttgataaaaaaccaacgattgccgacgaactgtatcaggaagatcagcctgtaaagatgttaaaaggaacacatactttctatgcgattcttgtcgacgaacacaataaagtcagcagtccgggcagcgcaatctacaaacttacagaagccaaatagaagctattgatttttctacatttttatggcaaaatagacagaggattataacacgttaccctatgaaattgtgccgtgttaaaataaaaataactaggaggatgttatgtacaaaattatcaaagcggaaaaactgaatgagattgtatatctcatggttgtagaagcaccgatggtagcaaaacactgtcagccaggtcagtttatcattgtaaaagaggacgatgcaggagagcgtattcctctgacaatctgtgattacgacagagaagctggtactgtaacaattgtattccagccaatcggagcatctacagaaaaatttgcaaaactccaggcaggagattcatttgaagattttgtaggacctctgggatgtccgtccgaattcgtgaacgaagatccagaagaactgaaaaaagaaaaaatcttgtttgtagcaggtggagttggtactgcgccggtttacccacaggtaaaatggctgcatgaacatggtattgatgccgatgttatcgttggtgcaaagaccaaagacctgatcattctggaaaaagagatggaagctgtagcaggcaacctgtatattacaacagatgacggatcttacggaagaagtggtatggtaacaaaagtaatcgatgatctgatcgccgaaggaaaaacttatacaaaatgtgtagctatcggaccgatgatcatgatgaaattctgctgcctgaccactcagaaatataatattcctactatcgtttccatgaacccgatcatggtagacggtaccggtatgtgcggtgcctgtcgtgtcatcgttggtgacgaagtaaaattcgcatgcgtagacggtcctgaatttgacggacatctggttgactggaatcttgctatgcagagacagcagatgtacaaaacagaagaaggaagagcgttattaaaactgcgtgagggtgatactcatcacggcggatgcggacagtgcggaggtgacaaataatgggtgacgtattaaaaaaagtacctgtaagagagcaggcaccgaaagtaagagcaacaaactttgatgaagtatgtcttggatataacaaagaagaagctatggaagaggcttccagatgtctgacctgtaaaaatgccaaatgtgttcagggatgtccggtaagtatcaatattcctgcgttcattaaagaagtgaaggaaggtaactttgcagaagcatacaaagtaatcggacagtccagtgcactgcctgcagtctgtggtcgtgtatgtccacaggaaacacagtgtgaaggaaaatgtatccgtggtatcaaaggcgaagcggtatccatcggtaaactggagcgtttcgtagctgactgggccaaagaaaacggtatcaaaccggaagctccggcagagaaaaacggtcataaagttgcagttatcggttccggtccttccggtctgacctgtgcaggagatctggcaaaacttggttacgatgtaactatctttgaagcactgcatcaggctggtggtgttctggtttatggtattccggaattccgtctgccaaaagataaagttgtaaaagcagaagttgaaaatgtaaaatctctcggtgttaaaatcaacaccaacgttatcatcggtaaatccactactgtagatgaactgatggaaaatgaaggattcgaagcagtatttatcggatccggtgcgggtctgccgatgttcatgggtatcccgggtgaagtatccaacggtgtcttctccgcaaatgaatacctgacaagaagtaacctgatgaaagctttccgcgatgaccacgacacaccgatcgtaaccggaaagaaagttgttgttgtcggcggtggtaacgtagctatggatgctgcaagaactgctcttcgtcttggtgctgaggtacatatcgtatacagaagaagtgaagaagaactgcctgcaagacgtgaagaagtacatcacgcaaaagaagaaggcgttattttcgatctgctgactaacccgacagaaatcattgcagacgaaaaaggctgggtaaaagcaatcaaatgtgttcgtatggaactgggtgagccggatgcgtccggaagaagacgtccggttgtcatcgaaggttccgagtttgagatggacgtagatactgttatcatgtccctgggaacttctccgaacccgctgatttcttctactaccattggtctggacattaacaagagaaaatgtatcattgctgatgatgagacaggtgccacatccaaagcaggtgtatatgccggtggtgatgcagttaccggtgcagctactgttatcctggctatgggtgccggtaaagcagccgcaaaaggaatcgatgagttcatcaaaaacaaagcaaaataaaatcaagcaggattgattttaactgccggaagaattttctatacagaagtcttccggcagttttactttactggaaaatgtgcttgcaactgttcagtatcctcacagtcagatacgtttcctaaatcgcattttaagttaccataatattattatgtaaactctttcttttctcttaatattttccagtctgcttgtgagtcaatagattccatgttataatgaaaccaaaacacagatacttttacatgaaaaaggagaacaacatgatgtggacaagatttgaattgaaagagagaggcaaagcagcctttcagagaaactactggcgcagcgtacttgttgcatttattctgatgttatttgtcagcggtggcggaagtgctgtatccaacagttggaatcagataacttcttccggcacttccgatgattcttattatacagaatactttgatgacggagacatcggacacttttattacaactccggtacttccattcccgatatgctggtaagtggaatcatcgcagttgtcgtaggtggtgtcatgatcgtcagtgctttacttgggattttccttttcaatcctctggaagtcggtggctgccgtttctttatggaaaattctgaatatcagccaacggtaggacggctgggatttgcctttcagaagggcatgtacggaaaaaccgtattgactttatttttacggaaactttttattggtctgtggtctctgcttctgattgtacctggtatcgtaaaagcctacgaataccgtatggttccctaccttctggcagatgacccgaacatgacaagacaggatgcattccgcctcagcaaagaactgatgtatggacagaagtggaatacctttgtgctggatctttcgtttctcggatggtccctgctgtctctgtgtacctgtggactgctggcaattttctatgtcaacccatatgttcaggcgacaaatgcagagctgtttctggagctgaaacgtgaatattttgcaagccgccagaatgcgtatccgagtatgtaaaggaaatataattcagctatgaaaattacattgttgactgtaggaaaaatcaaagaaaaatttctccgcgatgccattgccgaatactcgaaacgtctcagcaaatactgcaaactggagattatcgaagtggctgatgaaaaaacaccagaccatgccagtgaagtagtggaaaaaagtatccgagataaagaaggggaacgtctgatgcgatatatccgggatgatgattatgtgatcacccttgaaataggcggaaagatgctggattctgttgcattttcccgtcagctggaaaatcttggtatccggggacagagccatatctgttttgtaatcggtggttcgatcggacttggtgatgcacttgtgaagcgttccgattatgccttgagtttttcaaaaatgacttttccccaccagctgatgcgggtaattctgttagaacagatctatcgttcttaccgaatcatgaccaatcagccttatcacaagtaaaccgaaatctaacgggtagttctaagctcagccggttgttttgcagacagcaaccggctgagcttttttccgtttgggaatatacctcctgtcaacttcttccgtctctgaaacatcttcgcagttttctttaaatcttctctgccagttccgacagtggtgcaaaatgatagcccatttcttcccattttgtcagaagttcatccagaatctgcgcgttcgtagaagaagtactgtgaagcagtacgaccgctcccggatggatccgttttaataatttatcaaaggcagcttcttttgtgggctgctgatcctggatccagtccacataggcaaggctccagaaaaatgtcttatatccaagatcgccggccatctgcagattttgtgtgttatatttcccctgcggtggacggtagaagcgggtaagttcttctcctgtaattttctgatagagtgtttctacgtcctttagttctttttcaaaggaagctgcatcagaaatttttgacatttccggatggtggaaggtatgatttcctacagtgtggccttcagccaccatttgcttaacgagttccggactggtttccagataatttcccaccacaaaaaaagttgcgcttacatcatgctttttcaatgcctccagaatcgccggtgtattaccattttcatatccggcatcaaaagtaagatagatgactttttcatctgttggatccatataggcggcatgatactttttcaattcttctgctgatacatttcctgtcggtttttctccggtctgcccaaaaccaagtccccagttctctgtctcaggatgcagaatctgtccggaagtctccagatgctcctgttctgtgtgacactgtatcgccgcgccgacaaaaaagcaggcaatcagtaccacacaacaggtaagaaagtctgtttcccggattatttttcctgtgtgcagccattgtttgatacaatttaaatatttcataggtactcttttctttttctgtctttactgtatatgccagagagcggtctggtattcaccacttgtattctggcggtacagacggtataatagaacgtaatgatttaagtaaaaaaggagtatttatgaactttcaatcaatagaaaactatattacacaatttcccatttatcagtatacctttctttccattgatgatattgaattcaatgacaaagtacgcaccatctgtaagagggaatgtccaagatatggaaaatcctggtcatgtccaccggcagtaggaactgtggacaaatgcagagaacggtgccagcagtacacacatgcccttttattttcttctgtggcagaagtgccggattattccaatatggatgctctgcttgctaccaaacaggagcatgaggagatcactgcaaaaatcgaagcatttttaaaacaggatgcctggcgatgctatacactgtccacggattcctgttccatctgtgagaaatgcacatatcccaaaaaatcctgtaaccacccggatctgatgcatccttgtattgaaagtcatgggatcctgttgaccaaaaatatcgaagaaaatcacatggattattatatgggagaacagatggttctctggttctcactgattttcctccgggaagcataaagatcggcgaattctcataaactgaataataaacaccgggagcattctgtgaaaaaaataaaaataacaacagtgagagagtgtctggctgatctgctggaacttcccggcgatctggcatatcatggatgtatcatcacactgattggtgaacgggagattcttctggaaaattaccgaagtatcctggaataccgttccgatcatcttttagtactgaccgcaaatggaagaatacgcattcagggagtttccctcagcgttctttactacacagcacttgagatgaaagtaacaggacagatcacatctgttttgtatgaaatctgactgcgacgatcgggaggtacgttcttggattctataaaaaaatatatccgcggctacgttcgcattcgtctggaaagccctgcaccggatcggtttttcagtctctgtgtacataatcggattcctcttcgaaatcttacccaggaagcttccttctatgaaatggaactctctgccagagatttcctgcgtcttggccggtttcgccggaaaacagatgcccggatccatatcttatctaaaaacggtctgcctttctttttacttcatgcacgaaaaagaaaggctttttttctcggaatatttcttggcttttttttgttatttgtatgttcccttcgtatctgggatattcagatcactggaaaccgttattataccacacctgttttcctggatacattatccgaatgggatatccactgtggtatggcaaagaaaaatgtagactgccagaagctgatgcagaaaatccggcaggcctttcccggtgttgtctgggtatctgcaaagcttgagggaacctgtctgattattgatatcagagaaaatgacgaaatcccgcagtcaacggatgccttagcggacaccctcaccagctgggatcttaccgctccgtggaatggcaccgtagtaagtatcatcacccgtatgggaatgccacaggtaaagccgggagatgtctgtaaaaaaggagatattcttgtatctggttcggttgcaatcctggataatgacagtcagatacaacgttacgaatatgtgcgtgcggatgcagatatcgttataaaaactcaatttccttattatgatgaattttcccggacggtcactgtaaaatcatatcccggagagcaagaaagctatcctttttttacattcttcggaaccgatatctcctggtatcatgccccaaaaaataattctgaaatttatcgcatcgaacgccgactgacccttacccccagtttttacctgccagtcaccgtgggaaaaatcataaccgttccctatgaaaaaaaatcctactgctatacaccgaaagaatctctggaactttcacaaaaacatctgcaaaatttcctgaaaaatctcgtacgcgaagatgccttgattctttcccggaatatccgtaccagactcactgcaaacagatgccgttcacagggctatgtgatcatacagattcccggaagcgaaaaaactccgatagtccggaaagcacttccggattccacgtcttctgtttccgaaacaaactgattttttcctgttgtccacgctgtgttcggtgagatatttcacggtacaggagcgatatacagttactgtttgctccgttcccggtaacacgcttcgcgggatattaccattgaacattaacaatatacatacagaaaatacagaaaaatcataaaaagggcttcaattccactaaaaaggtggtaaaataaaaagatagaatgtccgtgttgacattttaaaagaaaaacagttacgaaaggacaagatgaatggcggcaagaatcatcgaacagctgatagaaattccggcagaacatgaaagaaatatcttcggacagtttgacgaacatataaaaaagatcgaacgcaccttacaggtaacactgatttcccgtgacggcatattaaagatcgtagggcctgcaccaaatgtgcagaaagcggaaaagatcatccgggaattgctggggctttctgtcagaggaaataccattcagagtcagaatgtggattatgcactgtcactgaccatggaagagaaagaagctccgcttgtggagatggataaagactgtatctgccacacgatcaacggaagaccggtcaagccaaaaacgctgggacagaaagcatatgtggataagatccgggaagatatgatcgttttcggcgtagggcctgccggtactggtaaaacctaccttgccatggcaatggcgatcacagccttccgaaatgacgaagtgggaagaatcatcctgacccgtcctgccatcgaagcaggagaaaaactgggatttcttcccggagacctgcaaagtaaggtggatccctacctgcgcccactctatgatgcactgtatcagatcatgggaccggaaagctttgcaaaaaatatggagaaagggctgattgaggttgcccccctcgcttatatgcgcggtcgtacactggacaatgcatttattattctggatgaggcgcagaatacaactccggcacagatgaagatgttcctgacccgtatcggattcggatccaaagtgatcattaccggagattcttctcagaaagatcttccttccggtcagaaatccggtctggagatggctcttcaggtgctgaagaaagtagaagggatctccatctgtcagctgaccagcaaagacgttgtccgtcacccgctggtacaaaagattgtacaggcctatgaagcctacgaaaagaaacacccggaaaaaccggcatcaccgaaaaatcaacgacggaggggaaacagttatgagtattgatttttccaatgaacaggaacagacctttgattttgattttctgaaggtcgcagaagatgtcatggaaaccgttctggatcaggaaggatgtccctatgaatcacaggtctgcctggttctcacagataacgaaacgattcataaaaccaatctggaatatcgtcagatcgaccgggcaacggatgtgctgtctttccctatggttgattttccggcacctgcagattattctgtgctggaagacgatgacagctgctttgatccggaaagtggagagcttcttctgggagacatcatgatctccataccgaaagcagtggagcaggcagaagcttacggacacagcgtaaaaagagaatacgcatttttagttgctcacagtatgctgcatcttctggggtatgaccatatggttgatgaggaacgtattgtcatggaacagaaacaggagaaagcactgcagcagctgcagattggaagagattaattttatcaacgaaaaggagatcacatatgaaaaaatatgcaaaactgatcatagcccttgggctggcaggtggcatcatgctgaccggatgccagaaaaacgagtctggttccgccgaaccgactgcaacgccggaaccaacagaagaagcaacagaagaagtaacaccggaaccaactgccatggctgctgaagaaccggaacccacagaagatccgattccggatggctatgttgtaagttatctgaccggagaatatgtaccggaagccatcggaagacgtcgcccggttgctgttatgctcaacaatctgagacctgcctgcccacaggccggtattgctaatgccggggtagtatacgaagcacctgtggaaggtggaatcacccgtctgatgggtgtctttgaagattatgataatctggaaaagatcggttccgtacgaagctgtcgtgattattatattttctacgcttcaggatttgatgcgatctatacgcattatggacagtctgcttatgcccttcctttcctggaattaccggaggtaaataatatcagtggactggccggatacggtgatcaggtattttatcgtaccactgacagaaaatctccccacaacgcttatacaagttttgaaggtatccagaaaggtatcgagatcaacggctacagtcaggaatacgctgaggacttccagcctggttatgccttctgcggcgtagatgatgaagtggaacttccgggtgagacagaagcaaatgtcgtaaaaccgggatatttcctgaatgagccatggtttgaatacaatccggaagacaaactgtactatcgtttccagtacggtgacaaacagattgatcagctgaccggagaacagatcgcctataaaaacatcattctgcaatattcttcctggagaaaatacgatgaacacggttatctgaacatcgacgttgatgaaccaaatgtaggaaaatatattgtaaacggaaaagccatcgatatcacctggaaaaaacacactccatggggagctaccttctactatgataccaacggtaatcagatcactatggataccggtaagacctgggtatgtattattcaggatacttacgcagaccgtgtggagattcttggttccgatgacaactctgcttcctccacagatacacaagacagtgaagcacaggcagcagcagaagaagctgcagcatcggatactgaatattaaaatgattatttttactgaataaacgctgaaatttatgaataagacaggaatcattcgctgatactgtaagaaaaaggagtgttctatatgcgccgattctcttacgtattaatcgtctgttcctgtctttttcttttgactgcaggatactatttcagctaccagcttggaagctccgatacctcagagatacagccatctcagctgcgggaaacagaacagatcctgcagccctcttatctggttcgtatcgtagacggaaaggttgttatccagcatccggacggttctgtctacgaggccacggagatttccgaagaaagtcttccgatgtctgtccgtgaaaaaatccaggaggaatatcggctgaactcacgtcaggaactctacagttttctcgaaaattattccagctaaaaaaatactggaactttctccgttggtgcggtacaatgatatagattattgcggttgcaccagcaatcccaatatgtcagtaaaacaggcaggagataaaaacgaatgaacacaacatttcgtgaaaaactgaaaaataaaaaacgtatcgtcatcaagatcggttcttcttccctgactcacccggataccggctatctggatctgatcaaactggaagttctggttcgggaaatcagcgatctgaggaatcagggaaaagacgtaatcctggtttcttccggtgccatcatggtaggaagtaaaactatgggttatgacagaaaaccatcgcgcatggcacaaaagcaggcatgtgcagccatcgggcaggcaaagctcatgatgatctatcagaaattattcgcagaatataaccaggttgcaagccagattctgatgaccaaacatacgattctgaataatctgaaccgattaaatgcaaaaaatacattcgaagaactcttacgtatgggagcgatccccatcgtaaatgaaaatgataccatatctacctatgaaattgaattcggtgataatgacacgttatcagcagtggtttctgctatggtaggtgccgatcttctgattcttctctcagatattgacgggctgtttaccgatgatccccataaaaatccagaagcaactttcatcgatgtggtagaagaactggatgagcatctgctgtccatgggaaagggaagtaccggaagcaacgtaggaaccggtggaatggcaaccaaactgactgctgccgagatcgcgagtgccgccggaactgatatgatcatcgccaacggtgccgactttcatgtcatccataagatcatacagggacgcccttatggaaccctattcctgtcccataagaaaaatgatttttacgttctggattttctggaacggatgctgtaaaaggagaacagaaacatggatcaaaaaggaattgaccgtatcaacgaacttgccagaaaggcaaaaacacaggaactgacaccggaagaaaaaaaagaacagcataaacttcgaaaagaattcatcgcaagcgtacgtatgaacctccgttctcagctggataacatcaacatccaggaaaaagacggaagcatcaccaatctgggagaaaaatatggaagcaaagaaagccattagaaaagaaattttccgacgccgaaaagaaacggatccggcatctatctgtaaaaacagtgcaaagatctggcagaaacttttctcacttcctgcttttcaggaaagcgactggatctatctgtacatagactgtaaaaacgaagttatgacagacggaattatcaaagaagcgttccgtctcgggaaaaaagtggctgctccgaaagttgtcggagaagatatgatcttttatcagatctcacagccagaggatctggaaccgggatattttggtatccgcgaaccgaaaacaagtcttccggttgcagacggagaggatggactgatgataatgccaggagtcgctttcgacaatcagcgccaccgggtaggatacggcggaggcttttatgaccggtatctgagcaaacacaccagtcattttaccgcagcactggcattcgaattccagatgatggaggaagttcccaccgaaccgacggatctgctgccggatgtggtaatcacagagaaaacaatttaccggtaagtactgccaggcaggaacttacagaagggagaatacatatggaatacctggataatatcgggaaacgggcgcaggccgcaaaaccggatctgcaacatctcaaaagtgaagaaaaaaatcagattctaagaaaatctgccgacgatctgaagctccatgcaactgagatcctggctgccaatgaaaaggatatggaaaaaggccggacaaatggcatgtcccagggacttctggaccggcttttattaacggaagatcgcatcgcacagatcgcagaaggtctgtatcagattgccgctctcgatgatcccatcggtgaagtgctcggcatgaaacagcgtcccaacggtcttcgtatcggtcagaaacgtgtacccctcggtgttgtcggtattatctatgaggcccgtccaaatgtaactgccgatgcattcggtctttgttttaagaccggcaatgttgtgatcttaaagggtggaagtgatgcgtttcattctatccaggcgatcgtaacctgcatccgccgcacactgtcggaagcaaacgtgaacccggatgctctgcttctcatcgaagatacctccagaaagactaccgctgcattcatgaaactgaaccagtatgtggatgttctgattccgcgaggaggtgccggtctgatccgcgccgttgtggaaaacagcacgatcccggtcattgaaaccggtacaggcaactgccatatctttgtcgatgcctccgcagatctgtctatggctgtggatatcattatcaacgccaaaacgcagagggtaggtgtatgtaacgcctgtgagtctcttctgatccacagagaggtaaaggataaactgcttccggttcttgctgcacgcttacaggaaaaacacgtggagatccgcggcgatcaggaggtctgcaaactggttcccgatgctgtcaccgcaacagaagaggattggggaaaagaatatctggattatgtgatttccatgaaaaccgtagattccgtggacgaggcaatcgcccatatcaaccgttacaacaccggtcattcagaagcaattatcacagaaagctacacgaactcacagaaatttctcgatgaagtagacgccgcctgtgtatacgtcaacgcatccaccagattcacagatggatttgaatttggtttcggtgcggaaatcggaatcagcacacaaaaacttcatgcaagaggaccgatgggtctgcttgccctgacaaccacaaaatatattatctatggaaacggtcaggttcgtccataagaattctacataaaatgcaaatacacctgtcattcaaatttgccagtttgaacgacaggtgtatttgttcattttttttcttatctcttttcctctctggttctaaaatacgatcttccgcatatatacataaaaggggatatatttcccgaaattctcatttatcattttcatatgacacagggaggtttgtatgattacgttaaatcaatcctatacttatgaagaactcctccgcaatctgcaggaatccggaacgcagtacccggaatcctcgatttacaaaaaagtaggggagagccatgatgaacgaccaattccgatgctccgtgtcggattgggactggatacgctgatcctgacatccggtatccatggaaaagaatccatcaatccggtacttctgacccggatggcacaggaatattgtcaggcatatcaggataactcatatatagggaattatccggtgcgggaattgctcaaccactgttccatctgttttcttcccattgtcaacccggacggttatgtcattgccaccgaaagtttcagtgccatccgcaatcccattctccgtcaggcatgtaagatgcgcggtgtggactggccctactggaaatacaatgccagagcagtcgatattaaccggaattttccatgtaaatcctatatccagcagcagttcggcgaatatcccgccagcgagcaggaaacgcaaacgttgatccgtgtcttcgaacagtgggataccatcggctacctcgattttcattccagagggcgcattatctattattacaggcaggcaatgccattttcctataatcagcgtaaccacaagctggcgcgttatatgcagaaattatctaattattctcttggtaaacaggaagaggaatacctgtcccgcttaaacggcggaagtccagtcaattattattccgaactgctgcataagcctgcgatcaccgtagagactgtagaagaaaatgcagattttcccatggatccgtcctgccaggaaaggacatacgaagaaatccgtatgctgccgcttgagatcatcgcgcaatcagccggtaattccgagccgttgaaaaatccacagaaaatcagataataatctctttacatgatgtgaatagaattctatactgagtatatgatgatatccggctttctagagcgtgtctgaaaaaggctctagtatagaatcagccagtatcaaaatctttgtatatacgggggaatttcacatatgaataaaaaagtaattctgatctccatcgacggactcagaccggatgccgtggaaacctgcggacatccttttgtaaacacactgagagaaaacggatgctattctccggatgcaagttctgttgtgccaccggttacccttccggcgcacacctcaatcttttacagcgtcccgcccatccgccacgggattatcaccaacgactacatgccaccggtacgaccgatccgcggactggcagagcagctggagcgtgcggataaaacctgcgctgctttttatggctgggaaccaatgcgtcatgtatggacatccggaaatatgaaatactctctctttgtcaatgaatacgaagaggataattcagatcttctgctcacgcaggaagccctttccctgattgaacggaaagagccggattttgtatatctatatctggtggaaacggacgacaaaggcggtcacgaccacggctggatgacatcggaatatatgcaccgggtaaacaatgcattttcctgcgtccagcaggtctacgaagctgtccatgaccgatacaccatcgtgatcaccgctgatcacggcggccacgaccggggacacggcgaaaatatcccggaagatatgacgatcccgatgtttttcatcggaaaagaattcccgaaagctgtacagctgcatggacttaccctgcttgacctcgccccgacgattgcagatcttatggggattccgaaggtgagagagtgggaaggaacgtcggtgttggaaacattagactgatatataccctgaacatttgcttatgtgtgataaagaagtaatagaagtgtaaaaaattttgccgttcctatccggcacatgaggtatgtcggataggtcgggcggttaggtgtcgggcagttctaccttgccgacaaaagaataatagatttcgatttcctgtctgcgtaacttgccccggcgtttcccgtcaagggcaacgctttcatggacaacgattttctccacaaactcccgcagcagagtaggggtaagttcttcaatggtagtgtgcctgcgtaccacattcataaacttttcagcgtttgcggtggcttcctgcgctttggaaagttcttcccgcagtctggcggcacgttctttcagttctttctgctcggcttcatagtctgccgacagctctgtgaaacgctcgtccgatatgcgcccggttacgctgtcctcatacagccgcttgaagatagcagataactcggctatgcgtttctcggcggcttccagctcctttttcttggcggcgttcctgcgtctgtccccgtcctcattctgctcgattaaaagcttcataaaccgggcttcatgctttgccgcatagctggtaactttccgcagattggagagtacgccagcggtcaagaggtcagtgcggataaagtgcgctgtgcagtcggcggtgcgtttcttgtagcttccgcagatataacagtcctgcttgcgcttgtccgtctggtatcgctgctggtacatgacgctgccgcagtcggcacaaaagagtatgccggagaacaagcccacttcgtcataacggttggggcgtttgcgctgcttgcgtaactcctgcacccgttcccacgtttcccggtcaatgataggctcatggtggttctcaaaaaccgcctgcttttccgggggattttctatgctgtgtttcagcttgtaggacggcttctcggtcttaaagtttaccagacagcccgtatattcccggttttccagcagatgaaccacggtattggtcgcccacttgcactcatagccggggtggtagcggcgggtgctgcccgtcctgcggtattccagcgtccccggcgtggggatttgctgctcggtcagcatacgggctatcttggtcggaccgttcccggcaaggcaaaggctgtaaatctgccgtaccaccggggcggcttcctcgtcaatgataaagttttcgtcctcgtccatgaggtagccatagacgggcttgcttgtgatgggctttccgctcatgcccttagagcgttttactgccttgattttcttgctcgtatctctcaccagccattcgttaaaaatgttccgcagcggggcaaaatcattttccccctgtgcgctgtccactccgtcattgatagcgatgaagcggacacctttctgtgggaaaatcatttctgtgtacattcccacctgtaagtagtttcgccctaacctcgacatatccttgacgataactgtcccgactttccctgcttcaatgtctgcaagcatggcttgaaatccgggtctttgaaagttcgcaccggaataaccgtcgtcggtgtaccagcgcagattagaaaatccattctgtttggcataggtttccaaaatcctcttttggttggaaatggaattgctctcgccttgcagctcgtcctcatgggacagtcttgggtaaagggcggtaatgagttgctgggtggtctgtcttaacataaattcctccgtttccgacagccagccccactattccgtaccttgattgtaccacatggggcggctgtctgtatagcggcaaaagcgtcaaatctgcttctttacggtcggtaaaaatgacggtttttcaatcaggcttatcacaggtcaaatatccggcggcggcttctgcttccagcactttcatcatcttgtcagcggcggtgtcggtcgccccctccttgaaaaagccagacaccacaaggattgtgttgcctatcctcgtttcggtcacgcagtccgggcggcgggcagggcgtttgtttctctgggtgtcggtcataggcaaatctcctttccggcaagcagccgtttcagctgttccatttttccctgtgcggcggctttcctcaaattctccccggtaaagcagagaggggaacacatttcaagcaggcggtcataaatccgggcgtgggcggtgtcctccgggtgctgcaattcctccagcgtgaggttggtcgtcacaatcagcggcttcctgctccggtagcggctgtcaatcacattgtagacctgttccagaccgtattctgtgccacgctccattccaaaatcgtcaatgatgagcagggggaagctgcaaaggcgggaaatatattcgttcctgcccgcaaagctggcggcaaggtcgtttaatattgctgcaaagtttgtcatgcacaccgggacttcctgctccatgagggcgtttgcaatacacccggcaaaatagcttttcccagtgcctaccctgccccacaagagcagcccgtagttcccgtcctttatctgttcccagcgtgccacatatccggcggcgttcttcatctgcgggcagctgccgttatcgttggcaaatgtccagtcctgcatggtcttgtctgtaaagccctgccgtttcagccgttccaccgtttcaaggtggctgcgccgcttctcggcggcttcccgttccttacgggctgcccgctggcagtcgcactctgacgggtggcggtcacgcccgaaaaaggtcttgccctccgggaaataggcttctttgggtttccggcatttgccgcagtataaaagcccgtcctccccggtgtaatcctccggctcggctgtggtgtcggtcataggcagtatggtgttgtggattgtatcggtcataggctttctccctccttgaatgaatagtccggtatgcctttctttggcttctctttggcagcgtcctcctgcgcccacttgtaaatggtggctgcatggctctggtactgcttcccggtggaagcgatgtggcaggaaaggcggtcaaggtaatactcccacttgccggggaagtcctgttccagctccaaaagttctgtgtcagaaagaaatacatttttatatctgccataagcggcggggggctgcccctcactcgctccttttgtttggctctctattaggttgtttatattagtttggttaggggacggttttccgaccgtcataaggtcagttttccggctgtcagttggtcggtttcccgcccttatgaggggcggttttccgtccgtcagttggtcggaaaactgtaccactgggataggcggcactttcacatacagacggttggcggcagaaaagcccgtccgtctgcgttccagcagcccggcagcgtccagttcgttcagtgcgccctttatggtggtgcagcctttatccagcatttccgctatctctgctatggggtagacaatgtatgtccgtccctcgctgtcctgccagccgttcttctgcgaaagggtggaacggtctaacagcagcgcatataactctcttgcggtgtgggataggtctgtttccagcaggaaacgggggtaaggcaggtaagcgggcagctccgttcctgcggtcatataatcagcgatagggttcacctccttgtggtgtctgtctgtgggttctgttacgcttttagggggcgtttttaagggaaaaggataaatgtatcacgcaccctttgacaccctccaaaaaagccttgatttatgcgggtttgaaatgccctaaagcgtgacatttctccctttgtttccgcttccgtttggcggcgtttatccgcttcatgcgtccggcgcagtccgggcagtatttcccccggttggattttgggaagaagaacgccccgcagacagcgcagcgtttccggcttccccggcgcaagagggcggcttccagtgcttcatcaaggggcaggacagcggcggtaaaccagcggcagagcagcgaatagctgatactctgtacacacacgcaaggctcgccgtcctccaacagcaggcagttcccgctgtcatagttgcagcactcatgcacaaggcggcgggctgcccggtactggcggtagtccatgcgggggatattaccgttcatggctctgctcctttctgcgctgcggctcgctccggcgtaaaatctggtcgatattgcccttgacagtctgcaagcggcggtactcctcccgttttgcccggtaatcgttgtagccgctgtttttctctttgataaggctttcaatctctgcttgcagggatttatagctcggcagcttggaaatgccgttctccctgaaatagcgggcggctgcgtctgctatgataaagtcactttcatgcttctgacggtaggctgcttttgctttggcgtttttctgctgtttcagcccgtcccggacagggcgggtcttggaataggcaagcacctgccgttgcagctcctttttcccgttcagcgtcttttccacctgcttcaaccacgcaaggctttcctgcatggcggcataggcggcagaacaggcttcgtccagttcctccggggaggaaaagccgtactgctgataggcggtaacggtagctgccatttgctttaggttgtgctttgccgcccagcggtcatagcccacgcccttgccctcggctcgcttggcttcccggtcaaccatgcgctgcaaggtgttgtctgccggggtggtttttgcagctttttccccttgtaacggctttttaactgcggcagggtattcgggtatggctttggtctgttcggcagctctgtgggcgttctgcgtgagcagggcaaggacagcagccttgtcaaaatcgtcccccagctttcgggctgtgataggctttgtcctgtccggcgtgaggtaggaaagccgcccccggctctccttgacggtcacaccctcccgcagcaaaagggaagaaaactcgtcaaagctgccagcttgggaaagtgcctgccgtatcgtccggcgcagcttcgccttgtccgtttcaaacttggtgggcttggtcggctgtccggcggcttctctggcggcgttctctttgtcaagggcaagctgccctttctttgccgcccagtattcccgttcggttatccgttccttgctgccgttcaagaggtcgatttggtaaagcccctcccggtggcacatttccatgacttcgctcttgaaatattccatagcggcgttggtgcagcggtgcttgcagccctccagcgtgtcggctggtctgtccatgtagggcagaagcgggacttcgtaaatccgcagggagttgatgacgatatgcacatggatattcccgctgtggttatgcccgtccgggtgggtgcagattagggcttggtgtccggggaaatgctccttgcagaactgctcgcccagctcctgcgcccggtctacggtcaagccgttgtctgtcccgtcccgtgggtcaaagctgatgatatagtggtggcttttcacatcttcccgtttttggtttttctcatagcggagattggctcgcatacaggcaacagcgaaatcctcgcccccgcagttgagggaagaaatgcggtaatcctccctcggtatcagccgcccgttttcatcaagggtggctttcatggtaaactcgtcatgctcaaatgtgagataggcttccgctgcgccatagtcggcgtttttagagctgatatgtttgaatgttgccaacagcgtcacccactttctgcaagacttcaaactttagggcagcaaggtcggaaaccgccgcccgtacctccccggcaagctgcggatagggactgtgccactcgttcagcgtccgggctatctggtttaagttgccgccgatcctcccgtattcggcggtcagcttcccgacagcggcaagcagctcgtcattgatgggggaaacggttatgatggggcgtatggctgccccggttatggcttgccggataaactcggcttggctcatgtggtaagcagaaagccgctgggcaaactcggcgtattcttcctcggtcatgcgtgttttgactacccggctgcggtgcggcgtgttgtatcgtttcataggtggttgacctcctttctgtgcgtggtgtcctctcactaataggagaaaaacagggtgtgaagcggaactgtttttgaaaaatccgaaaaatattttgaggggtttttcagcggcgcaagccgcataagcagggtttggggaaggcactccccaacaagattcccgcaggggcaaaatgagcgataagcgaattttggcacctcggtagaatcttgctctaagaaactgccggcctgccgttcacttgctactgccactttttcagaaaatctataaccagctttttttataaaaggctgcgggctggcgtttttcccttactccctacaaaccacaaaagagcagaatggacggactttccggcaagaacttttccggcggctcggtctttcccgacaataaggcgtttcggaagctgcgttttgcccgctgtctgaaaaaaatggcagccttttttggtttcactgtctaatacggaacttttggaaatttgccaaaaatggacgcaaaaaaagcagcaaatctttttcggatttactgcttcatgtgccgctgcggtgcggcgggatggatattcagttgaaataaaagaggatggtggtactttagtctatcgactctttactaactattaggtaatcttgaaagattttccttgaatttatctaaagaatgttcattgtttcccgcaaaaataagtggaattgtatattcatatgatatgccattttcatagtccgataattgtatttttttagtatcatccctctcatctttaggtgctatatatatgaatgaatttttatttatatcagatattttccctttttcagaagaaacagtataaccccagtctgttaaatttgtctttattgtaacttctgtttctgtttcttttctagtctgcaatgctgttttatcgatttggatatcaaaaggagtcgaacctaacaattcactgtttatatttacaagttcttctccatttgttttagaaatattagattcatcttcataattttgttgagattcatcttttggtgtttctctgttacatccttttataaagcataaaataattagtactaatacagaaagttgttttttttgcatttatttctcctttcatattatcaaagaaagcactgagagtactttcaagaaattttgaaatattctcaatgctttctattttttgattataaacttgccggtaatgatactatgttaatttatctctttcgcgtaacctttgttgcaatatacacatgcaccattcacccatttgtgagacatttcaatcgtctcaacttcataaatgcttacttctccacaaattaaacattgtttgtaattatatacatgacgtgtcacacatttatcccagtcatcatatataccaggcatttcatcttcatatccatagtactggggagaaccccaactatgagtatgagcggcaaatacagtcattggagcagctacaattccagctactactgaaagtgctaaaatagattttcttaaattcataagttcctccctttccttaaaaatacatagctctttgttacattgtcattttaacataataattggtaaaatgcaataatttattttctatttacgagaaaatactgtgcatattatcttatttaggaatagttaaggcggctacctaaatctttttattactttaccgcacatgagcattccatctcggattctctgggcattcttttctgtttcattttctcaatctgtgatataatgagcacaagagagccagagggagcttgctctctcttggcgaacggcgaactcacgacataatgaatgttagattttactgtaacagaaaggacgaaaacatcatgtcagacaccaaacagatcttatccccttattttaaaagcatcgttgatcaggaccggctttctattgtaatctgtgatctggaacatacgattatttatatgaatcctgctgccgtcgaagattatcataaatatggcggggcagcactgatcgggaaaaacctcttaaactgtcacaacgcggattcgaatacgaagattcatcagatcatcgactggtttgcagcggattcatcgcacaatatcgtttatacttcacacaatgaaaagaaattaaaagatgtttatgtgattgctttacgggatgaagacggaacactgatcggctattatgaaaaacacgaatatcggacacccgaaacaatgaagacttatgatctctggtaactcccggaaattgtagcgataactatcaaactatatttgcaaaggagagcatatattatgaacgtagaactgaaaagagacggattaactttacgtggagaactgttactgccggagaaagacagttatgacattgctattcttatgcatggatttaccggaaaccgcaacggagaattactgacggctcttgccgatgctctgttagaaaaaggggttgcttctgttcggtttgattttaacggacatggggacagcgacggaaaactggaagatatgaccgtgttaaatgagattgcagacgcaaaagtaattctcgattatgccaaatctctgaaacatgcccgtaacatcttcctgttcggtcattcccagggcggtgtagttgcaagtatgatcgccggatactatccggaagttttcaaaaaaataatcctgtctgctcctgctgctactttaaaagacgatgccatcaaaggagagtgtcagggaaccacttacgatccggtacagatcccggataaaatccatgtacacgaacacaccatcggtgggttttacttccgcatcgcgcagagtcttccgatctatgagatcgcttctcactacaccggagaagttctgttgctgcatggtgacagcgatccgatcgtaaataagattgcttcggagcgttaccatgatgtttataaaaacagtgaactgcacattgtaaaaggagctgaccacggatttggtccaagcatgcagccggaggcaacacaggcagctgttgattttttctgcaaagaagactaaaatgaccaatcatcttgcttttgatatcttataaaaacgccgggagaacagatactatgacaacacgagaagaagcacttgcatacggtttatcatttgacaacgtgtacgaagaaaaaccttttcacgatcccaactggcagcttgtccgggttcgtggaagtaaaaaagcatttctctggatctatgagcgcaatggttttatcaatctgaatgtgaaggttgcgcctgaatggagagatttctggcgctctgcctatgattcggtaatcgccggctatcatcagaacaaagagcactggaacacgatcattctggacggaacgatcccggaaaaagagatccgccggatgatcgccgaaagttatgatctggtcacagacagtccgaccaaacgaatctacgaagcagttaagcagattccgaaaggtcatgtggcaacctatggtcaggttgcagccatggcaggtgaaccgaagatggcaagagctgtgggaaatgccctgcacaaaaacccggatccggaacacattccctgtttccgtgtcgtcaacgccaaaggagaactcgccggagcattcgcttttggcggtgagcaggtacaggctcagcttctggaagaagatggggtggaagtggttgacgggaaggttgatctggataaatatggaatacagatcaatccttgaagatcatattaaagtttatataaaaaaaagaatatatgaaatagcaaaggtatattttcgatacagagccatgggaagtctgctgccgaagcagccaaatataaatataccatgcaatatgaagatatgccggaagcagaatgtccgaacacgatgttctgctttttgcgttactaggaacagagtgagaagtactttgtgggcgtaatcataaaatattcaaacatttctcttgcaaactcctcccggatagtatatctttatttatgatgcggtttttatgccgtgtcattcttgtgttacaaaaaactacagaaaattctatttatattgaaaagaggaaaagcaaataaatatgagaaaattagctttagacgatgaaatcctgctgaccatcgagaagccggcccgatatatcggcaatgaggtcaatgcagtgatgaaagacaaatcggaagttgcggtccggtttgccatgtgtttcccggatgtatacgaaatcggtatgtcccatcttggaatacagatcttatatgacatgtttaaccagcgtgacgatatctggtgtgaaagagtgtattccccgtggccggatatggacaaagtgatgcgcgacaaaaaaatcccgttgttcgcactggaatctcaggatccggtgaaggattttgatttccttggtatcacgatccagtatgagatgtgttataccaatattttacagatcctggatctgtccgggattcccctgctggctgaaaagagaacctgggatgatccgatcgtgatcggtggcggtccttgtacctacaatccggagccgctggcgcagttctttgatattttctatatcggagaaggtgaaaccgtatactttcagctgatggatctgtataaagaagaacgagcgaaaggcagcagccgtatggaatttttaaagaaagcggcacagattccggggctgtacgtaccggcattgtatgaggtctgttataaagaagacggaaccatcgcttctttcaccccaacagacgcgtccgttcctgcatctgtcgaaaaacagattgttatggatatcacagacacgtattatccaaaagctcctgtggttccatttatcaaggccacacaggatcgtgtggttctggagatccagcgtggctgtatccgcggatgccgtttctgtcaggcaggtatgctctaccgtccgaccagagagcgtgatgtggaattcttaaaacagaaagccgttgagatgctggatgccaccggacacgaagagatttctctgagttctttaagttccagtgactattcacagctcccggaactggtgaatttcctgatggaagaatgcgacagacgaggcgtgaatatttcccttccatctcttcgaattgatgcgttctccctggatgttatgaagaaagtacaggatatcaaaaagagcagcctgacatttgcaccggaagccggttcccagagactgcgtgatgtgatcaacaaaggtctgacccgggaagtgattctggaaggtgccggaaaagcttttgagggcggctggaataaagtgaaactgtattttatgctcggacttcctactgaaaccgaggatgatatgaaaggtatcgctcatctttgtgaagaaatcgcggaacgttattacgagatcccgaaagatcagcgaaacggaaaatgtcagatcacagcaagtacttctttctttgttccaaagccatttaccccattccagtgggctccaatgtgccgggaagaagaattccttgatcgtgcaagaatcgtccgtgaagagatccatgcacagctgaatcagaaaagtatccgctacaactggcacgaagccgatgttactgttctggagggtatcctggctcgtggtgaccgtaaggtcggggatgcgatactgaaagcttacgaacacggtgcgctctttgatgcctggtcagagtattaccatccggaatactggaaagaggcatttgccgagtgtggtatcgatactgatttttataccatcagagaacgaagtgatgatgagatcttcccatgggatttcattcatatcggtgtcactaagaaattcctgttacgtgaatggaaacgtgcccatgaagaaaccgtaacgccgaactgccgtatgcagtgttccggctgtggtgcagcaaaatatcagggaggtgtatgtgttgaaagtaagagttaaattttccaaagaaggtgccatgaaattcatcggacatctggatatcatgcgttattttcagaaagccatccgaagagccaatattccgatcgctttctcaggcggattttctccacatatgatcatgtcgtttgcggcccctctcggcgttggtgtcaccagtgccggggaatactttgatatggaattgacggacgattccctgtcttccaaagagatggagaaccggttaaatgcaacaatggcagagggaatgaaagtgatcagtgtccgccagatcccggacggaaaagcaagtgcctgcatgtcattggtggcagcagctgattataccgtagcattccgcgagggaaaagaaccctctgtcgagtggaaaaaaggacagctggaagcattttttgcacaggatagcatcgagattctcagaaagacaaaacgaagcgagaaaatcaccgatatcaaaccgtggatctacaaactggaactgcgcggtgacaaagtctggatgcagctttcccagggaagtgttcacaacctgaaaccggaattagtgatggaagcattcgcaaaattcctcggaatcgaactggaaccctttgcactgatgatccaccgggaagaagtctatgccgaccgcggtgaagaggagatcccacagctggtatccctggaagcgttgggagatgtgattgtataaaatggaacgtgttatcattaccactctctgttatcacggaacagactgccgggtagctgcctggcaatcaaacggaaaaatcagccgaatctgtctggaagaccccagggaagaacgtctgctcggaagtatccatgtgggaaaagtccagaaaattctcccggatatcaaaggagcttttgtggaaattgaaaaccgcaccagctgttatttcccttatacgaaggaatctaattttctctacacaatgccgaagaaagcaccagaattacgcgccggcgacgaacttctggtgcaggttacccgagaagcgataaaaaccaaagccccctgcgtctcttcaaacctgaattttaccggaaaatatctggtgctcacaaccggaaaccgcacactcggtatttccgcgaagattccatccggaaagcgggaaaagttaaaagagtttctcgaagagctgatgccggaagactgctcgtacggcatcattcttcgaaccaatggtgcgctggcttccgcggaagagttgaaggaagaactgcggtcactggaaacgcagtttacacagctgtatcagaaagcactgcacacaccgtgctatacgaagctttccaaaggagaatcgatcactgcatccattctgaaagatgtgcactggaaagaaacagaaaaaatcatcacggaccagaagacgctgtatgaagaactatgtgtttcccgtcaggatattccggttgcatcgatgtgtgcaattgaatattacgaagattccctgctgccgcttgcaagactctataatcttgaacgggagctcgatcaggcacttcaggagaaaatctggttaaaatccggtggatttctgataattcagcagacagaagcctttgttgccatcgatgtcaacaccggtaaacacagcagtaaaaaagatgcagaagaaaattataaactgatcaaccgggaagccgctctggaaattgcaaggcagctccggcttcgtaatctgtcaggtatgattctggttgactttattaatatgaaaaataccaatgatcagtctgaattgctccaatacatgggttcactggtcagatcggacccgatgcagactgtagttgtggatgtaaccgctctcggcatcatggagatcacccggaaaaagtctgccaaaacccttgcagaacagctgctccagctgaagaagggagaataaactatgcgagagaaaactttaaaaccgtggcacggagccgcattttttctgttaattatgattgtgttttttgcaatctgtgtaccgctgcagtctcatttcggactgtatggtgtggccgctacggaaattattttattgattctggcactgctatttgcaaaagtgatggggtattccctgcgctctctgtttccggtgcattctccggaaggactgccaatgttaggaactattctgatgtggatttcgtcctatatccttgcaatggtcgtttcactgatccagtatcgcttatttcccggagaaatggagacaatcaacgagggactgaacgatgtgatctacagcgtacctttctgggtatctgtgatcatagttgcgctgcttccggcaatctgtgaggaagcggttcaccgcggtgtgatcattcataccatgtatcgtatccgaaaagaatggctggtcgttctgattatgggtatctattttggtctctttcatgcaaacccgcttcgtttcctgcctactgcgatcctgggagcagttatgtcctatattatgctggagacagaaaatatggtatattcctccgcatttcatatgataaataatctgcttcccatggtgctgcaggaatttcttctgaaaacgtctcagctacagcaggcgcaaaatcagcttactggtactgacggaaccatgacggttcctctgatttccatcggtgtttatctgatccttggagcagctgttcctttcggaatgtacctgggcaattatctgttacacaaacgagataatgtaaaacaaccgtttttcccgaaagaacagatggatcgcacagtactcaaaattgcaattccatccgcagttttcttcattgcaggaatcatttgttttggatgtggaatttattttgagtccatgttataattatattattgagctaaaatgacgtatattattgaaaaccgttacagcagtgtaaaaggaggaacaaaagtatgggcaatgttgccatcgtcaccgacagtaacagtggtatctcacaggcagaagcaaaagaacttggaatctatgtgatcccgatgcctttcttagtagatggaaaattatattttgaagatgtggatatgaacaaagaacagttctatcattttcttgaaaacgatgcagacttatctacttctcagccgtcacccggtgatgtgatggatctgtgggataaacttttaaaagaatatgatgaaatcgtgcacattccgatgtccagcggacttagtgcatcctgctctaccgctatgggacttgcccgggattatgatgggaaggtacaggtagtcgataaccagaggatctccgttaccatgcagcagtctgtaatggatacgaaacatcttgttgctgccggaaaatcggctgcacagattaaagaaattctggaaaaagaggcactggaatccagcatttatctgatggtagacaccttaaaatatctgaaaaaaggtggtcgtattacgccggcagcagcacttcttggctctgctttgaacctgaaaccgattttgcagattcagggagacaaactcgatgcctacaaaaaagtccgtggtgtcaaagctgccaaaaagaacatgctggaagccatgaaaaaagatgtggaaggccgtttttccgattatgtcacaaaaggacagttaaaacttcatgtagcctataccaccgatgaagaaactgcaagacaatggaaggaagaagtgcagagcatgttcccggatattgccatctcacgaatagatccattatctttcagtgtcacctgccataccggtccgggtgtactggcaattgcggcatcacatgtgctggatggtgttgaataactgtcgtattctattataataatatttcaagaaaattttcaaaaagcagttgacgaatccaaaaaagcatggtaatattacgaagtatgccgcacaaagaggtagaagagctcgaaagagccaccatatttggcgagtaatgataataggaggtgtgccatatgtacgcaattattgcaacaggtggtaaacagtacaaagtagccgaaggcgatatcattagagtagaaaagcttggtgtagaagctggagagactgttacatttgaccaggtacttgctgtaaacaacgacggtttaaaagtaggagctgacgtagctaatgccagcgttactgcatctgtagttgaaaacggaaaagctaaaaaagtaatcgtttacaagtataagagaaaaactggttatcacaagaaaaacggacatagacagcagttcacaaaagtgaaaatcgaaaagatcaacgcttaatcaggtggtctgatgacaaaagttacgttttatcagaattcagaaaatcagtgtgtaggctttaccagtgaggatcatgcaggatatgctcaggaaggtgaagatattgtctgcgccggtatctctgcactggtgatcaatacggtgaattctattgaggcctttacagaagatgaatttacgattgatgtggatgaatcatctgcacgtattcattttatgataaagaacaagccttccaaagaaagtctcctgctgctgaattcgttgattctcggattacagagaatggaagatgaacagtacacagaatttattgatataatcttcgaggaggtgtaaaaaccatgttaaatatgaaccttcaattttttgctcataaaaaaggagttggttctactaagaacggtagagattccgaatccaaaagattgggagcaaaaagagctgacggacagtttgtaaaagctggtaatatcctttacagacagcgtggaaccaagattcatccgggtgtaaacgttggacgtggtaaagacgatactctgtttgcattagtagacggtgttgttcgttttgaaagaaaaggaagagataagaaacaggtttctatcgttccggtagctgaataagcatatgcagcgggcttcaaatcagaatggtttggagccttctttttatatattcgataacaggaacagtgacatcataattttagttcactgtttccatctaatattgacagataggagaaaaatatgtttgcagacagagcaaagatcgtgatccgttccggtaaaggcggggacgggcatgtaagcttccgtagagagttgtttgtgccaaacggtggtccggatggcggtgatggcggtcgcggaggtgatgtgatttttgaagtggacgaaggtctgaatacgttgaatgaatttcgtcacaaaagaaaatatgcagcacaaaatggcgaacagggcggaaaaaaacgatgccatggagccgatggaaaagatatcacactgcgtgttccggaaggaaccgttgtctacgaagcagaaagcggtaaagtaattgcagatatgtccggtgaaaatcgccggcaggtgatcttaaaaggcggtcgcggcggtaaaggaaacatgcactatgcaactgccaccatgcaggttccgaagtacgcgcagccaggccagccggcccaggagctggaagtacgtctggaactgaaagtcatcgcagatgtgggactggttggatatccaaatgtaggaaaatctacatttctttcccgtgtaactaatgcacagccaaagatcgccaactatcattttactacccttacaccaaatcttggtgtggtagatctcgatggtgctgacggttttgttatcgcggatattccgggactcatcgaaggtgcatcggaaggtgtgggactgggacatcagttcctgcgtcacatcgagagaacccgtgtcatgatccatattgtggatgccgcttccacggagggcagagatccggtagatgatgtctataagatcaatgcagaattaaaggcatataacgccgatattgcttccagaccacaggtaatcgcagccaataaagtggatgtgatctatcctgacggagaagatccgattcagcgtctgaaggacgaatttgagccacagggcgtaaaagtatttcctatttctgccgttaccggcaaaggtgtgaaagaacttttataccatgtaaaatctcttttggattccattgagaaaaaacagattattttcgagcaggaattcttcccggaagacgttcttattgcggaaaatctgccatataccgtagaaaaactcgacgatggtcatacttatgtggtagaaggaccaaagattgagaagatgcttggatatactaacctggattctgaaaaaggattcgccttcttccagaagttcctgaaagacggcggtattcttgaagaactggaacaggcaggtattgaagagggagacactgtccgtatgtacggatttgaatttgattattacaaataaaggagagtttatgacaagcaaacaaagagcatatctgaaaagtattgccatgacaacagaaccaatcctgcagatcggcaaatccagtctgacgccggaatttacccagtccgcaaaggaagccctggaagcaagagaactgattaaaatcagcgtattacagaactgtatggacgatccaaaagaaatcgcccgtgttctggctgaacggaccggttcccaggttgttcaggttatcggtaagaaaatcgttctttataaagaaggaaaaaaagagaagaaaaagattcagcttccgtaaggagaacatcatgaaaaaacgaattggaattatggggggaacctttgatccgattcatataggacatctgattctggcagaaaaggcttatgaggaactggctctcgatgaggtctggtttatgccttccggaaatcctccccacaaacagaaccgtgagggacgtgcaagtgatcagcagcgggtggagatggtgcgaaaatccatcgctgacaatccacatttccgtctttccacagaagagatgcatccggacggatatacgtatacttatgagacactggaacggctgcataagaaatatccggatcaaacgttttattttatcatcggtgcagattctctgtatgattttgacacatggtgcagaccggatcggatctgtaaggcagccagtctattggtagctacaagaaatgctgttccggaagaatccctgaaagaacaaatgttatatctggaagaaaaatacaaggggaattttatccagctgcacactcccaacctggaaatttcctcacagacactccgtgactggatccgtcagggaaaaagcgtacggtattatcttgtggatgaggtatatacttatattcgcgaagaaggaatctaccgggcatagtcccggattcctctcttggaaattacaaaagatgaaaaatgcaggaggaatgttatggaagaacagaatttcaatctgatgaagattgccggaaagctgaaaaaatatctggacgaagaccgtctctggcatactctcggtgtgatgcagatgagtgcatccctggcaatccgctatgattatcctatggaacgcgcacagctggcaggtcttcttcatgactgtgccaaatgtattccggcaaagaaaaagctgaaaatctgtaaagataataagattccggtcacagactttgagagagagcatacctttttactccatgccaaagtaggtgcctgggtagcccgggaaaaatatggtgtaacagatcctgaaatcttaagtgcaatcacctggcatactaccggaaaagaaaacatgacacttctggaaaagattgtatatattgcggactatatcgagccggcaaggaataaagctccaagacttgctgagattcgtaagattgcttttgagaatctggatctgtgcatgtatgagattctgcatgacactctggagtatctggacgatgacccacaggacatcgatcaggcaacgatacaggcctataattactatagtgacttgattaatacaaaataaggagaacataaaatgacagatgcaaaaaaaatggcactgctggcatgtgaagctttggaagataaaaaagcttccgatattaaagtaattgatatcgaacagattaccactctggctgattattttatcatcgcaagcggaagtaatcgtaaccaggtacaggcaatggcggataatgtagacgaagtactgggaaaagccggttatcagctcaaacagacggaaggctattccagtgcgaactggatcctgctggactacggtgacatcgtaattcatcttttcgacgaagagaacagactgttctatgatcttgaacgtatctggagagacggaaaagtgatggatgcgaaagagctgaaagaagaacagtaagcgcatccgaaaatttattgatatatcgtaactgtgaaggtactgaacagttacgatatatcgcaaataaagaaaaagagtacagaaactgattaggattttctgtactcttttttcaattactcataataggccgtcgaatctcattttacatttattttaaagagattattccataaaccgatatacaccgatgaccttgccaagaatttgcaactgatcatatacgatgatcggatccatgtaatcgttttccggctggagacgataacagtctttttctttgtaaaatctttttactgtagcagaatcatctaccagagctactacaatatcaccattctgtgcatctgcagtctgctctacaattactttatcaccatcaagaatccctgcattgatcatactttccccaacaacattcagaataaaggtctgtgcgttcggcataaattccgccggaatcggaaaataactttccacattctcgatcgccagcagtggttcaccggctgccacacggcctaataccggaacattcaccatctctctgcgcaccaggttaaagttgtcatccacgatctcaattgctctcggtttggtaggatcacgtcggatatagccattcttttccagactctccaggtgtgcatgaacagaagacgtggacttcaggttcaccgcttcacaaatttcacgtaccgcaggtggaaatcccctgttcagaatttcgtttttgatatattccaaaatttcccgttgtttatctgtaattttcccgtatgccatagctgaatcctcccgaacatctgattctctttttctttattatatatctatttgcatctgtaattgtatttttctgacttcattacaaattctgtaattatttaattataatgataacatatacacacttaaaatgcaaacacatattccgaaaatctgttcggattttctccaaaatcatattgacaaacggatgttcgagatttataataaattcacagttaaagaacaaatgttcgcaaacatatgtttcaaaagtatgggaggaatttactatgatgaaagaatacaaaggaaagacaactgttacacgaagcactcgcagaaatttacaccccggaaaatgtcgtaccagaaaaacaaaatgcagacatctcccttttgccagtatgtttttgatctgtctggcaacagtagccatactccgttttaccagcgtcgatgcaaatgcagatgtgccggaacgttataaatactatactaacgtttatgtagaccgtgataccactttgtggggtgtttcccagaaatacatcagtgatgaatatacaaatatccgcgcttacatggaagaagtgaaaagcattaaccatcttccggatgatcagctgatctatggaactaccatctgtgtaccgtattactccgatgaatacaggtaataaatatagtttactttaactcgtgaagtcccggaataattattgattagaaaaattaataaatagtttgttatttattacaaaaaagggtgttcaaatatcttatctccatatataataaataaataacaccaaggaggaaaaagatagtatgagtaccaaagaaacaggtcattccagacagatggacaaagcgttatttgatttctacggaaagccatcgttcggacaagttatgcccctggcgatccagcatgtacttgctatgattgtcggatgtgtaaccccatccatcattgttgccggtgtagcaggactttcccagaaggattccgttattctgatccaggctgctctggtaatgtcagcacttaccacgttattacagttatttccctttataaaaaccaggtggttcgccatcggtgccggacttccggttatgatgggtatcagttttgcctacgtgccaagtatgcaggcaatcgcaggcgagtatgatattgccaccattctcggcgcacaaatcgtcggcggtattgttgctttactggttggattaaacatcaagcgaatccgcaagtttttcccaccattgattaccggaacggttgtttttgctatcggattatctttatatccaactgccatcaattacatggccggcggtgcgagcagtgagaattacggttcctggcagaactggctggtggccgttatcacgctgattattgtaaccttcctgaatcattatgggaaaggaatctggaaactggcatctattctaattggtatcattggaggctatattgtatcactttgttttggcatgatagatttttcttctgtatccagtgcatcatttttccaacttccaaagccaatgcattttggaattacctttgaaccttcatcctgtgtagctatcgccattttatttgcgatcaatgctgtacaggcgatcggtgatttttctgccacaacaaccggtgctatggaccgtatgcctaccgataaagaattaaccggtggaattgtaggatatggtatcagcaatattatcagtgcatttttcggtggactgcctaccgcaacctacagtcagaacgtcggtattgtttccacgacaaaggtaacaagcaggagagtaatgggtacagctgcagtcatcttacttgcagccggtctgatcccgaaattttcatctttacttactaccataccttattgtgtacttggaggtgcaaccatctctgtatttgcatccatagctatgaccggtatgaaactaattgcttcggaagagctgaatttccgaaacacaactatcgtaggtctggcaatcgctgttggtatgggtgttacacaggcaagcgcatctcttgcacagttccctgactgggtaactacaattttcggaaaatccccggttgttcttgctacaatttctgcgattgtcctgaatttgattcttccaaagcagatcgatccgaaaacaaaataaaaacagactgatatttgaaaagatgtataggaaaaagtaagttatactaattatatttctatacatcttttttaattgacaccagtgttttttctatagattagattgggtaaatctctggtatttctacacatatgattctataataaaaatatatctgatattagctgttccaagctaatgtacaatttgttagaacgatttatatcggataataaaaacgataaggagattttatactgtttatgagtctgacattgcagcatggacgtccggaaaatatgacagaacgtctgaaaaaagagcaaaaagtatatgaattactggatctattacatatcgaatatgaccgcgtggatcacgaaccggcgatgcatatggatgtgtgtgaagaaatcgataaggttctgaaagccgcaacatgtaaaaacctgtttttatgcaatcgtcaaaaaaccgatttttatctgttattgatttcgggagagaaaatattcaaaacaaaggatttatctgcgcagattggtagttcccggttatcctttggaactgcggactatatggaagaatttctggatgtgactccaggctctgtgagcatcctaggattaatgaatgacactgatcatcgggttcgtctgttagtcgacagcgatgtactgaaagaagaatacctgggatgtcatccatgcatcaatacatccagtttacgtttaaaaacaaaagatatatttaacacatttctgaatgccgtagatcacaatatgacagaagttcatttataaatatctaaacctaattatgtttcccttgtcaatctatttgaaaaactgttgtttgtcgtacagattgacaaggctcttttcttgtgctaaaattctttcaaaggcttattttttatatactattcagaaaggatttttattatggatcgagttacttatcatgagcaaactgatatggaaaacattttaaaacttcgtgaagttcttcgtactcttccggaattttccagggattatttccgtgccattgattcaacaacaaccacaaaaaccagaatttcttacgcgtatgacatccggattttctttcagttccttgtgaacgaaaatccactgtttaaggataaaaaaatcacagatctgaccatcgatgttctggaccaggtgcaggctctcgacatcgaggaatttatggaatatttgaaggtttacaaagataatcaagatacatatgttactaacggcgaaactggcttaaaacgcaaaatttcgacgttacgcagcttctacaattattactttaaacacgaaatgatcaaaacgaatcctcctgccttgatcaccatgccaaaacttcatgaaaaagctattgtccgactggataccgatgaagttgccatgcttctggattatatcgagcatgccggggatcaactttccggacagaaaaaagcttactacgaaaaaacaaaaacccgtgatctcgccctgatcactctcctgcttggaaccggaatccgtgtgtcagaatgtgtcggtctggatgtcgaagatcttgatttcaaaaatgatgcggtaaaagtcacacgaaaaggcggaaacgaaatgttcgtatattttggtgaagaagtagaaaaagcattgctggattaccttgaagtacgtgagacagtcactccggtagccggtcatgagcatgctctcttctattctattcagaggaaacgaatgggtgttcaggcggtggaaaatctggtaaaaaaatacgcacagcatattacatctacaaagaaaatcacccctcacaaactgcgaagcacttacggtaccgccctataccgggaaactggagatatctatctggttgccgatgtattaggccataaagacgtaaacaccactcgtaagcactatgcatctgttggagatgaacagcgtcggaaagcagcctctgcattacgattacgggaagaaccgccacagaaacaataagtacatatgcaatataacaaaaatggacagtgaccggctatttggctctgcccattttttatatcttcatttttactcaaaaccatcaatgtcccacataagccctgcatcagctgttgtacttaattatttttcatctattatatttcttttcttcctgttttttatgcaaatgcagcatcatccaaaagtatcgtaaacggaccatcatttatcaaagatactttcatatctgctccaaaaatccccgtttctactacaggcacctgttcttttgctttttcgatcatatattcatacaactcttctgctttttgaggatctccggcatccgtaaatcctggtcgatttccatgtctgcaatttgcgtataaagtaaattgagacaccagcaaaagttgtcctcctatatccatcagagaacgatttgtcttgccgttctcatcttcaaagatccgtaactgtaatagttttttcagatatttatccaccacttctgtagtatcatctttccctacaccaatcaggaccatcaatcccttttcaatcgcccctactgtttttccatccacagaaacactggcttcctgacatctttgtattacaaacttcatgactttttctccttctgtatatcatatcatttattccgttgttttgtgatcctctgtattcacttcattattggcattcgcttttgtccgaattttacgataacttttaaatacgctgtcacttcccggtttctctgcagatggtgccaccggtttcaacgtttctgcatccagatgatcaatattctgataactttccagatcaatcggcatacacttcttagtcagacgattttgtataccattgcggattactgtacagatcaccgcacaggcaggaactccgacaaacataccgaaaatgccgaaaaatccacctcctacaagaatagcaactataaccataaaacttgaaagtcctgtggaaccaccaagaatcttcggtccaagaaaatttccgtcaaactgctgcaagagcaggataaaaataacaaagtaaacacattggatcggattaaccagcaaaatcagcagcgcactcggcactgcaccaatatatggaccaaagaacggaattacattcgtcactcccacaataacactgaccagcaatgcatatggcaaattcagaatcgttgtacctatatagcacaaaatcccaataataaatgagtctaacacttttccaatgataaatccaccgaaggtcttatctacatactgaaggtcacgaatgatattatttgttgttctggtactgaacaggcagtacagcaaccgctttccctgcgcaacgtaagattctttaccgtacaacagataaatagatatcatggcaccgatcagaaagtttttcaagaataccagaactcccaggaatccggtagaaaagcttgcaaccagaagatttattttaggcagaagatcatccgtcagccaggtttccgctttagatgttacggctgagaaaatcatactggagttttcctcaagatccggataatttttcagaagattcgtcagccatttttctatattattaatatatcgtggcaaattgtcgataatatttgtgatactgttgatcagttccggaatcagcatagataacaacccatagattaccagcaaaaacaacaataatgtaataataacacaaatcatccgaatcgcatggcgtactttatgagttggattccagttttttttctcacagatccgataaaccacactgcgctccataaaacggataaccggccatagaacatatgatattgctgctgcatatacaattggagtaaggatggtataaatcgtattcaatcccctggcaattgatgccgtatgaaagataccaaagtaaaataacatactggcagctataacgcaaaatgctgtgattccaatctggacatatttctttcccaagaagtttttcatctgaacgcctccacgagttttctgttaataaacatatattatctattatagcacagaataaaatccatgtattaactatttatgacttttctgtaaagtctttatttgatatacttaaataactgtaaatttattttattcaaagaatttacaaatttattctgatttatacaattattctgatattttataattggaggaaccatacaatgaaactgcaacaattaatgagttatacaagacgtgctatcgatgattacaacatgattcaggacggggatagaattgctatcggtatatcgggcggaaaggacagtttaacgcttttatacgcactccatggactacaacgctactatccgaaaaaattcgatctggaggcaattacggtcgatctggggcatcctgattttgatgtgtcaggcattcactccctgtgcgaaaccatgaaagttccctataccgtggtaaaaaccgaaatagcccggatcgtgtttgatgaaaggaacgaaaagaatccatgctccctgtgcgcaaaaatgcgcaaaggtgctttaaacgacacgataaaaaaactgggctgcaataaaatagcttatgcccatcacaaggatgatattgtagaaaccatgatgatgtctctgatctacgaagggcatttttattcttttcctccgatcacccatcttgaccgcaccgaccttacggtgatccgcccgctgatgtatgtttctgaagcagatgtgaaaggcttctgtaacaaatatcagcttcctgtcgtaaaaagcccctgtccggcagacggatatacaaaacgacagtatgtaaaagacctgctccgaaaactgaatcaggagaatcccggtgtaaaagagcggatgttttctgcaattgtaaacggcaacattcctgactggacaccaaaaatccgctgatttacatatatgtgtaataaataagcccacataacagatcctctcacctgttatgcgggcttatttattatactacacaatatacagcttcagacagtataataaaattgtaactgtgaaggtactgaacagttacataaaatttagtaaatagctgttttatatcccttttctttcagctgaattgcatttaacaccagttctacagagccatctactcccattttaccactgtcgatacacagatcataggaatctgcatcaccccaacgtttgctggtgtagtaattgtaatagctagaacgttttttatctgttttgatgatacgatcttttgcttttgcatctgtcagatcataaatttttgcaattcttcgaatacgcgtctgcagatccgcgtggaaaaatacgctgaaacagttatcaaaatctgccagggcataatccgcgcaacgaccgatcatgatacaaggtccctcagctgcgattttcttgatagtttcaaactgagccaggaaaactttctgattaattggcatatcagagaatgcagatgaagtataaccaaaagagtatgtatccataaccagagaatacagaaaactattggttggtttttcatcatgattctcaaaaagttcttcgcaaagtccactttcctttgctgcacgttccagtaactctttatcgtaacacttgatacctaactcttctgcaaggactcttccaatttgacgtccggcacttccgtactgacgacctattgtaataatggtattggtcttcatagcaacccctcccgttcttttaatttattataattattataaaataaaacaaatcaattgtacagtacctattttcttaaattttctaacaaatcagtaaaatattctggtaatggggctgagaattcaatatattcattcgtccgtggatgaacaaaccctaaaaccatggcatgaaggcactgcccttgcagatgtttgaacggacacttcgccggcccataggtaatatctcccacaagtggatgaccgatgcttgccatatgcacgcgaatctgatgagtgcgcccggtctccagctggcactcaataaaagtgtatgcaccaaaacgttccagcaccttatagtgcgttactgcaggttttccgtttttgtagttgattgccatctttttccgatccgtagcatgacggccaataggcccttctactgttccttcatcttctttcagatttccatgtaccagggcgcggtattttctggtgattgaatgctctttcagctgatctgccagactctgatgtgccatatcatttttacagatcacaatagcacccgttgtatccatatcgatcctgtgcacgatacccggacgcatcactccattaattccggaaagatgttccttgcagtgaaacattactgcattgaccactgtatgggtataatgtccggcacttggatgaactaccatccctttgggtttattgatgatcagcacatcttcatcttcatacataatatccagtggaatatcttcaggaagaatgtccggacactccggctccggaagttccagcttcactgtatcggaaagctgtactttataatttgcctttaccgttttttcattgactgtcacatttccttctttcaataatttctgtaaataggatcgcgactgatccggcagctgttcagaaagaaatttatctattcttaaatttttctgttcctcatccggtgtaaacgtatagatttccactatgccttagactccttttttctgatgcttaagaactcaaattcgtcatctttatatatgaataaaatgcttactgcaataccaataaaagaaattaccacaaaaatatccgctacattgaataccgggaaattaatcagtgaaaaatagaaaaaatccaccacatatcccaggcggagccgatctataaagttccccagggctcccgctgtcagaactgatgctataatatgcaacaatgtataacgtccggttttcgggcaacgatgcaaaaaccagaatactgcagccagatagataatcgtcagaatcacaaaaataattctctggttctgcagaatgccgaacgcagctccacggttttccagataatgcaaccggaaaattcccgggatcagtatgatatcactctgatctttcaggtgatgcacaatcagactttttgtccattgatccagaagtgtcagaatcaccataagaatacagtccactccgataaactgtatggttttcttatttttcaccatcccttattctccttcgatcatatctccgttaataaactgaatcgcatccagaatttcttcgtctgtaactgttttatcgatgtatgcctgtccgatctttttgagaagaataaacttaatccttccgttatccatctttttatccgactttgtcgtctgcaatacagcttcattatccagaccgttaaagaaaatcggaagatcaaatcccacgttcatatcacggatctcgtagaattcctctgtcgacaaacagcctcttttgaaagagatataggcagcggcaatggttccaagtgccacacactggccatgaagaagttcaaaattcttcagtttttccactgcatgacccactgtatgtccaagattcaacagtgcacgttctccctgttccgtcggatcactttccacgacagcagccttgatctcgcagcatttgcgaaccattttcacaagaaccggatagattcgttcctgaatctccgacatatgattaatcgtccactcataaaatctggcatcacgaatcagacctgatttcaacacttctcccatgccactggcaaactgatcttccggaagagttttcagcgtattcagattcatatagacgagccgcggctgatggaatgcacctaccatatttttatactgtgcaaaatccacacctgtttttccacctacactgctgtctacctgagccagaagagtcgttggaatctggataaagtcaataccacgcagataggtggcagcagcatatccggtaagatctccggtaacgcctccgccaagtgctgccagtacatcttttcttgtatagtgatgttcgatcagaaacgcgtacagctcttttactgtatccagatttttagaagcttctcccgccgggaaagtatacaaatcaaccgttacatccagttcttccagtgccttctgtacttctttcccatacagatttcccactgtatcatctgctacaatgcagatcttgccacaggaaagctccagtttcttaactgcatccgccagttttgtaaaatcttcttcccagagaatctggtaatcaaattctgtctttgcgccttctctgtatacgcgtaattgtttgctcataaaattctcctccaaaataatcatcctgttttatttttgtagaaatgcaggatcgtatttgagaacacgttatatatatttctgtacggtaacactgcaccgtcctttttttgttgttcccgccattccgtcatagcggaactttccatatccacgaaccgacacaatatcttccggttttaaaggatgtccgttagatacaaccattttaccattgacaaaaacttttccaccctcgatcaatcccagcatactacttctggatgacgaaaatgccagagcaatcatcgcatccagccgtactgaactgactgttccgtggatctcctgaaactgtggtttcggaaggtcgtccggattctcaacagcggacactttcactgttgtatgccggattctggtaatgttctgcataagaaattcttccatctgtgcatggcagaatacatacgcatcctggcccttgatcactatatccccaagtctggagcgttcgattcccagatgaatcagggcacccagataatcccgatgagtaagcgcctcactgaattttccagaacaaggcgagatacggatacaccgaatcggatacatcgaaagaaaaaactcttcatttttcccataatcataagaaagagcatcaggaagaaatgctgctatctgacgctctgcttcttcatagccaccgaaggtacggatcataacacccgcttcctccggtcgaaagctatgtaccatatgaagttcattcaaatccagaaaatccgtaaacacaggaatctcccgataataggctgttcttgccagatctgccagccgctttctgaactgtacttcctgttctttcatcttagaagtttgtccgaacagaaggaacgtcaaaagcgccgcttaatatttcctggaaatcaccggaaatttccacattggctggtgtcaggataaaaatataactggaaatcttctgcagacttcctgcgatagaatagcatgcaccggaagaaaaatctatgattctctgcgctacatctacatcaataccttccagattcagtactacagtacaacggtcaatcagagtatctgcgatctctctggtgtcttccatggaagaaggtttgatcacacagacttccatcgtgccatttccgctgtttttctttctcatcggagtgatcttgctggatgcagacggagttgcctgctttacagtctgtttcggagcttttgtctgctttggtgccacttttttctccggttttacatattcaacttcttcatcttcatcatcatcgtcatccagttttttaaagaaacgatgtttcggtttttcctcgtcaagggcttccagatcttcatcatcgaagaattcatcatcatcgtcaaaatcatcatttaaacggatggcatctaaaaacttatctaaaacgctcattttttatctcctatctattttgttttggaataatctctctcaccaaaaataccggtaccaacacgaaccatagtggcaccttcttcaacagctacctgataatcgttcgtcatacccatactcagaatatccatatgtacattattcatgtttttactgcttatgtcaacacttaattgtttcaattttcggaaaacaggccgattttcttcaggattcggtacatatggagcaattgtcatcagtccctgaatctgcacatacggaagcttacagatctcctcaatcaaagacatggtttcttccactgatactccaaactttgtttcctcctgcgcaacattcacctcaatcaggacaggaatcactctctgaatcttttctccctcatggttgattgtttctgccagacgcagagaatccacagaatgaatcagtgctgctttgtctgcaatatattttactttattcctctgcaggtgcccgatcagatgccattcgagacttttcggaagttcttcgtatttggtgcaaagttcctgtaccttattttctccgaagatcgtctgtcctgcatccatcgcctcccgaatcatggaaatcggttttgtcttactgactgcgatcagagttacttcttccggattccgaccgcttttttcgcaggcttttctgatctcagctcgtacgttctgtaactgttctgctaccatacattattctcctttgtaagtctttatttaaacagaatatcgtcttctttcacggtatttccgtttctgacaatgtaatcaaactgggaaagtccataggtggtacctgtctcaactatacaatattcatcattttgttcaatcatgacgattttcctgaaaacagcatagcctttattaatacaatacacaccttctaatgctttcttttcttttatttcataaacagactggctgtcaggcttcaaaatcacatctccgtcctgaaaagtatccatatccacataatagtaatcatcgtcttcctgataaatcgtagccttgacaaattcagaggaatcatcttttccccttctggtaacctttcggtagaagccggcattaccatcttcttcatcagtagcaatgtattctttcggaatcacataaaagttctttttcacaatggaactgagcggaatctttaatcctgtctgtgtgtttgttaccaattcaatattcagaaagcgatcaccactatagcgaatcattccacggctgaatgtgatcttgccgtaataattgccgtcttcaccggtaacaatggtcagtaaacctgtctgcgtggcatcatcttttaaaaacttcactcggatcgtctttttttctgccagtgaaacaatctgatctgtgctcagcggtatcactactgaccaggtctcactggttatcagtttatacacaggatccccggaggatacctttcgttctttctgaagattggtaatctgatagtttttcttactgaaaagatctgacgtcagctgatctgctgtaatcccttcgtagccatccactgcataaacaacgataccatcctgtgctgcccggtaaattgtctgtccattggccgtctgcgtagtttccgtggagtcatccgtctgaagaccactgtactggagaatagatccctccagctcgtatttgtaattataaacatcataaaagttgtcactgtcatatgtggaggcaaatcctgcaatggaagagcggattccggcataatcctgttcggtcagttcattgactgcagcctgtgccggagtgtcccccagagtatagactgctccggattttccaactttactgttctctcttgcataataggtaatataaccggcggcattcgtatttaccacagattcttcacggattgccagtgctgtatatgtcttattattggataagggacctgcggtcacctgataggactgaatatgatctgcagtaagatacagaatgaccgtaattaccatatacacaaaaagtgccccaaagataaaggttcctatatttaacgggatcttacgaaaccatccggatattttatttttcctttttgtagtcatgaaaacactccccttcgtttttctgacttatactcatataaaattattctatcatccctctgacgaatacacaagaaaaaaaatatgcatattctgtgaaatcgtggaaatactggagataacgaaaaaaacaggaggttgatcaaattaagatgaaaggtttggattatacagcactgatactgacaatcacaggcgcaattaactgggggctggtaggactgttcaaattcgatctggttgctttcttattcggcaatttatcctggctttccaggatcatctatatcctggttggattaagcggtctgtacctttgcacctttttcagtcgtctcgccgacactaacccgtaagctgcggataactatgaaaaacacgttccgcgagtttctcatagttatcgcggcagtcgccagggtcgcgtgcatgcacggactttggctcgttactcgcgtaaaacatgaaaagagggtcgccaacaggcaaccctcttttcatccgctacagttttacaaggcaatgatgatatcatcctgaaattcagcaggtaattcttctttatccatggaaacacttaatacaaaattaattttatatgcctcggaaatatcttttaactgatgcagtgcatcggtaatatcttttccttccaattttgcatttttcaggaagctgtccagatacatttcctgaagatcatgatcctgagatacaataccacatacaaaaccgatgaattcatctgcatttttaatcggatatccggatacatcgatcagacgaattttattgttcagttcatacatatgtttggaacttttatccagatatacaatgttaccttcagcagctttaatggctccgttcactttatctaaaagctgcttagtttttcctttaccttttttgcctacaattaattgaaccatagcagtttcctcctttgatttctggtatatattaccaaaaagtactgttctgttgttgtaattatagaatatttcaccaagaaatacaatggtaaatttgaaaaaatctgaaaaatttcaaaaaaaacaggaaataaacgcacaacgcctggtgcatttctttcctgtttctgatatttttgaaaatcagctgattctactgattgatcgcagaaagcaactgattcatatacgtgtacagattcgtcttatttgccgcgtgaagaacaatagaaatatacggttccccataggcattctggctcaacagtgccagacaggagcctgcatctgatgttgtaccggtcttaccgccaagcaccgtcacattcttcggtgccgtcacctgacgggtcagatactgatcggtagcatccagatgaaaagttacttcctgctcacctctgttacaggtaagattataagaactaagctgtgcaatctccagaaaatgtggatacgtcatcgcttcctgtaacatcagataaatatcgtatactgttgtataatgattttcatcctgcagtcctgaaggattggcaaaatgtgtattggttgcaccaagctccagtgcttcctgattcatcatttccacaaactgatccacgcttccgccgatatgctgtgctatagcaaccgcagcatcattcccggaatagatcagcagaccatgaagaagttcatccagtgttacctgatctccttcctgaaagccaatctctgtggaaccggattcctggttcagagcctctgccggaattgtcactatgtcgtccatattcccatgcttaaatgccagaatcgctgtcataatttttgtgatactcgccggatatgatttttcatgaatattctgagcaaacatcacagattcatgatccagatcaaaaagaccggcttttgtcgtatcactgatcgcaacaccttccagactcatatttccggaggaaactgcatatgacgaggcaaaggaatcggctttctgtgtactgatttctgcaccatgtgtaccgtacatctcttcttttaccgaataagctgaagtcatatccagctgtgaagagcggcggagaagtacgagtgcggtaattcccacaccaaaaaacagaatcagaatccctgtaagaatcagtgtatcccgatacttttttttgataggtttcaataatcgttttctattttttatacatttcacgccagtcaagttctcctctttccagggatttgatcagaagttccgctgtggcaagatttgttgccagcggtataatatgtgtatcacataaacggaaaatcttatgtgcatccggttcatgctttttctcctgatatggtccgcaaaggaaaatcaccagatccatctgattctgttcaatcatagatgccatctgctgttcgccgcccacatgtcccgcatgaagtttatggacgtccagattcgtagcctcctcaatcagacggccggatgtcccggtggcataaagctgatgtttgctgaggattcctctgtatgcaatacaaaaattctgaagcagttttttcttagattcgtgtgcgatgaagccaatgttcatttttttctcctcccaaatatcttctgttttgcaaacctacgtttaataccagacccataccaatatacagactgaccagagatgtcagaccataacttacaaagggaagcggtgttcctgtgtttggaagaacgccggtggctacacagatgttcagaaaactctggaagccaacgacgcctgctacgccgcaacatataatcttaccggacaggtccttggcctttctgcttgtaattatacattcaaccacaatgaggaacaagagtaatatgataaaaacgcttccgatgaacccaagttcttcacctgcaaccgcaaagataaagtctgtctgaatctgagtaacaaaatttcctttatttgcagaggaaactttattgttattatatccttttccggtaagttcaccggaaccaatagctgtaattgaattttgctgctggataacatcatctttgtaagtctcgtcttccgggtacatccaggacatgattctgtctttctgataggagtcaataatcttgatatctgtctgtgtgatcagaataaatgccacaataaccagcggaatggcaactcccagaataccaccaatgatcttataactcagacctgccacatacatcatcagacagaatataatcgtaacagtgatcgtgtttttcagatccggctgaatctttattaaaaccagcggcactgcaaggagcactacggaagccagaatagtcttacaggtattcagggtatcttcgtgatccatcagaaaccgggcaaaaaacatgatcagcaagatcttcgaaagctcggtcggctgaaaacgtacaaagccaagatccagccatcgggtagcaccacctgcagaatccccgaagaaccgaacgatcagcagcattataatgtttaccccgtagatgatccagtaaaaattcaacagccagctgtagtccatcaaagaaactacaaccatcaccacgagaccaagaatcacaccgatcagctgtctcgactgcagagaagcttttgcacttcccaccagcagcactccgattccgctgatcatcagaagccagatgatcagccggaaattataatttttcaatctgtaaagtttaaacatgttaagatcctgtatcctttctggattttaacggtatatctgctgtgagaacgggtggtgactgatgaaaacagattgtcacctttcctgcatcaacaggtatgtattttcccgcagcttttatcatatcgttttttaacatctgcatcgtctgaggtgagcagctcacccgatccgatatgagaagcagtttgagtctgtcttttgcaatggtgccagaggctttccgttttttgccgaagatactcattgcttccctcctatctgccaaacaatcgtcccaaaattccttttttcacatcgagatcctggaaggggacttcttcaccaagaagccgatgacagatattgagataagcctgtccgcacagacctggcttgcctgccagaggttctccctgattcgtagcaattacaacctgttcgtcatcagggaggattccgatcagaggtactgccagaatatccgacacatcctccacggacatcatatctccccgttttaccatatccatgcggaggcgattgataatcaaacggatatctctcagatcctccgcttccagaagaccaatgatccgatccgcatcacgaatcgctgaaacctccggtgttgtcactaccagagctttggtagctccggcgatggcattccgaaatccctgctcaattcctgccggacagtccagcaggatgtaatcaaactgttttttcagttcctcacataattttttcatctgctccggtgtaacagaggttttatctctggtctgtgcagatggaagcaaaaacagattggcataccgtttatccctgatcagcgcctgttttaatcggcagtttccttcgatgacatctaccagattatacacaattcggttttcgagtcccagtaccacatccagatttcgaaggccgatatctgtatctaccagaactacttttttatccagtgccgcaagtccggtaccgatattggcagcagttgtcgtcttaccgaccccgcctttcccggatgtaacaacaattacttcactcatatccaatcctcctgatatttgttcatattgtctgtcttttgcatctcgatcagtctgtacctgcgttggaattgctggctgtacttgcctgtccggtaagaatctctgtttcatctttcagtccgaagtaatagttcagaatatcctttgccaccagttcggagtttgttgacgcataaccgtttgcaatacggattgcccacgcaatctgtggtttatctgccggtgcataaccgataaataaactgtggtttgcacggtttttactctgctgtgctgtaccggttttacctgcaagtgtaacgttcagatcctggaaaataccccagttggatttggtaataacgccttccataccgacatggacatcatcccagatcccctgactcagttccacatgatcaatcatttccggagtataatcttcaatcagatttccatcggaatctgttgatttatctaacagtgaaagattatatacattaccactgctcgccagaaccgttgcatacctggcaagctgagacgtggtataactgtgagtaccctgtccgatagcggacgggattggcagttcgttggaaacctgtggcgatgcttcagaaatctccagcccggactttttatccagcccaagcagattcgcatacttaatcagctgctgcatcgctgtattatcattaaatgttccttctgcattctgtccaagacgataagcggtttcactgaaaaatacgttacaggaattggcaataccatccctgatagaaagtgcaccatgtccgctcagcaaccagcagttcagtggtgctccctgcagtttatcaaatcggccgccacagtaaatgtagtcattatctgtaataactccttctgacagaccggcaatcgctgttaccggtttaaatgtagaacctggtgccgtacgttcctgtgtcgccttattataaaatggtgtagacaaatctttattcagttttctgtaataatctgtatccatattgttagcaagacgattattatcatatcccggataagatacacatgccagtgtctctccggtggacggatctgtgataacaacagaaccggaacaaggatccagcgccagctgcgccggtgtgatttccagagaactgatcttatgaagcatcagatccatcgcagaaagatttccggctttgaagttctgatagtcctcatcatcggtggaaaggactccctgttcatacagtactgtacacagctgctttcctgtaatttcatcgtccagaagcagatatttgtataacatcttactgaagtcctgatccgtagacagataatctgaaatatatgcagatagttcctggtatacttctgtggaatccagatatgtgtttttatctgaaaacttggaaatatcgatccagttctggcttgccgcataggtaagatattcctgaagagaaattgtctcatctttcgtccatgccttgtacatctcatcattcttatcgatggatgtctcagaaagaatacctgttttgtccatcagcagatcattgacaatatagctgacatatcccttcatctcctcgctgaggtctttatatggttttgtatcacttccggtcagctgttcgtccactttctggaagatttcttcctgcttccgttccagtgctgccgcaatcttctgctcagtctcagaggcgtctgctgccgtaaaatgatcgatatcgattacggaattatttaacagcgcataatacacatcatagattgggatcgggatcgtggatgcatcggtattttcatctgctttgaaagtcttgatgttctggatattggctaccagcacaccggcaatcttctgttcaagcaccttgtagcaggcaatctgcagatctttatcgatagtaagatatacattattgccctgtaccggatcttttttggaatcttcaccgatctgtaacacttttccgtaataatctacatatactttttccgatccgtcttttccctgaagcgtcgactccataaccttctccagaccggattttcctacaatagaagtagtactgtaacctgcatccggattctctgtccgcagatctgcaagttcgtccgaagaaatctttccggtatatccaagaagcggtgcaaaataaatactgtcggtatagacacgcacggaatcttcctgtacatccacaccttccagcagactcttgttttcctggatcgcagctaccgtattttcagaaacatcggttgcgatcgttaccggaatatattttcggaaactggttgtggaaagtgcatatcttaccgatataatcttcaatgtttcttcttttgtcagctgctccggaagaccggcttcctgcgcttttttcagttccgaagccttatagtcactgtgaccatatggaatttcatatcgtttcagcatatcttctaccatctgctgagcggaagcatttgcctcctctgttgtcagatcgtcaatataactgtgtccatacacatccgctttaaaacgtgacagtgttgtaccctccacatcataactgtagtttccggaactgtcgacactaatacggaaatcactgctgataacatctccgttgctttcgataatctggataatcttgtagatttctccattcaggctgcggtttctttctgtattatttgcatagtcaccactgtcttccagtgtgatcgaataagacagttcattggaagcaagaacctgaccgtttcgatcgtagatatttcctcgggtgcttttcagtgttctcgtttttgtcgtcataatactgaaattgtccgcatattcctgtccatggatgatctgcagagaaaacaggcggtgaatcaataccatactcagagctgcgaaaataaaaatcagcactgtagtccgtggaataataaattttttatgtcttttttttggtcgtctcatcaaggtaacttgggtccctcccattcattttccgtaagccagcggtttaatcgatagagcggtcggtataaaactgccgtaagcagtactgtatataccatctccggaagaataatatgctgcagatagctgaaaaaatccagccggccacggagcataaactgcaatccgtatacaagtactccatatgcgatatcactgccggcaaccagtaccattggcacttttacatcttcatcaaaaaagattttatacagaaagccattgcaaaatccaatatacatgtaaataagggcataaaagccaatcatacttccataaaaaatatcaatcaggagaccgcagaaaaatcctacgaacattccttccttttttcctctcataaatccaaacgatactgtgaggatcaaaagcagattgggaacaatggaagcaatggacagtgtctggaacacggttccctgtaagacaaatgccagcagaatcaataccgccagaatcagctttcttctcattgtttctcatcctcctgtgcatcctgcgtcggatccggtgtcggagttgtgctgtcatctggtgtctgtgattcctccgaagtcacatcctctgtcttctgctgcttcagttccttgataaccaggacttcctgaatatcattaaaatccactgccggaatgatcgtaccgcttttggtcagtttattggcatctgtagaaacatcactgatataaccgatcagaattccttttaaaaatttgttactgacagaagaggttacgattttatctccctcctgtacctgatcctctttatctgtcagctgaataaaacggatcttaccgtcgtccatcatctgcagatctcccgttaccatacagttctgagaaatggatgtgacagttgcgctgacattactgctgtcatcaatgatcgaacgaaccgtagcccaatgtgccccggtttccgtaacgattcctaccagaccaccatccgcgataacattcatatctaccgcaataccatctgaacttccccggttgatcaggaacgtgctgtaccagttaccggtatcttttccgatcacctgcgcagcgactttctcaaactccgaatagtctgtgtccaggttatacaatgttctcagacgatccagttcttcctggtcctgagacagtgtggtgtttttagcctgaagttcatccacctgtttctgaagtttttcattctccgcagacagctttttcatactctggaatccatttttctgatctgtcatccagtttcccacttcattaatcccattctgaaaaggaacaatcacataacccaggacattacgcaccggtgcaaaagaaaaactggttgaaagagacaggacgatcagtccaagacacaggattgtcatcatagttatcagatgttttgttttcattttatattggttcttttttttcatgacagctccttatttctgttttttgggagtgaaagcccagtgatgaagtgcatcgtgggtgataatttctttcagcccatatatcgtacacagttcataataatgtgacagcaggatcgggcagccgatctgcctggacagaaccctgtcaatatatggcagatgtgtactgccaccggtaagatagatcccttctgataagatcactttatgtatctgcggtggaatacgctccagaaaagcccgaatctctgtaatgatctcacaaatcgccggagtgatcgcctcatttactgccggtgaagtaatcacgcgttctctcggcaaaccgctcacacagtcaataccgatgatttttctcgcatccttcgtatctttttccagatttgcaagagatactttcaatcttccggctgtacgttcactgatagaaaaattaagctttctgcggatcgttgtcaggatatcctgtgtcagacggtcaccgcctacgggtatcaccttactgatgatcacacgggtatctgcaataacagaaatctctgttgtagctgctccaatgtttacgatcatggatcccttggtacgcatgatcggaatgccaagcgccagtgcatctgcaatcggacgttccaccaaaagtaccttactttgtctgagctgtccggtatgggcgatactgtaatatgcacgcttttctatctctgtcatatctaccggaacagcaaaataaatcaccgggtgccgcccaacgctgcgtccggtcttgtccagcagcagttgaagcatgatctccaggtgactgatgtttgcgatcataccattgagcatcggagaagatacctttacatttgtcggattcttttcgtatatttcatatgcttcatctccaacggcaagtacagtatctttgttgcgaatggcaatcatatttttctcttttaagatttcattactgttctgagagtaaatcttgatcatattactgcccaggtcaattccatatacatggtttttaaacataaatgcatatcccttctgttttgcatatcccaacataacggttcaccgctttcaccaaaccgctatattccggcaatatctctgtcaggaaagcaacccctcctgtcgaaagctgaaatactgctgatcccctatcacaatatgatccagaagtggaatatctaccagtgctccggcttcccatactctttttgtaaaaagaagatcgtctttgcttggttccggattaccgctgggatgattatgcaccaggatcatatagacagcccggtgacgaaaggccgcaaggatgagatctcttggcgataccagagaagaattaactgttcctctcgagatcacttcgtcacctaaaaactgattttttgtatttaacatcgtacaaatcatctgctcctgctcttcgtgccgcatccgttccatataatacgctgcaattgtgtccggactgtgaaaatccagaagttttccggcttctctggttgcaatccgcttggatagttctccaatacatttgatctgtacggcttttacctggccgattccccgaatctgcatcagatcttccatggaaagatgatagattccaagcagaccctgttcgttttgtccaagatgcaaaacctcatcggccagttgtacagaggagcttccacgggtaccggatcgtagaacaacagccagaagttcgctgtctgtcagcttctccggtccggaatgaagacatttttcatatgggcgttcgtccggcggaagttcctgaatacgttgtgaatatttcataaatagctctccttgccaggatctcttcaggctgagagcgaaagtctgtttgccagactttgatttatcttatcataaattttctgtgaattcaagattcctgatttataagcaatattttttacagacagcctcggccacccgcagaccgtccatcgcagctgaagtaatcccccccgcatagccggcaccttctccacagggataaaaaccccggacattactttccatctgctcgtttcgagagatccggaccggagaagaggttctgctctccacaccggaaaggatcgcatccggtcggtcaaatccatgaatctttcttccacaggcagcgattccaagatccagcgattctgccagaaaatccgggaagatctcccgcagattactcatagcatatcttccacggatgcatggttcaacttcaccaaaagcttttgtctcttttctttcatgaaaatcaccataggtctgtacgggaatcctgccttcatgaagctgataagctttctgttccagataccgctgaaagaatactccggccagaggattccgatccagttcagctgcaagagcatcttctcccatctgctgcagatacttccttccatacgtcacataatcctgcggtgaaaccgttacgatcatagcactgtttgcattccggctgtcccgcgcctgataactcataccgttgaccgcaagatagcctttttcagaagaagcatccactacataaccacccgggcacatgcagaacgaatagattcctcttccgttttccagctgatgtgtcagtttatagctggcagcaccaagttcttttactttcggttgtccatattggctcagattgatcatcttctgcggatgttcgatacgcacacctaccgcaaatgattttgcttccatatagattccatgatttttcagcatagaaaaagtatctctggcactgtgtccgatagccgcaatacagacctgtgtttctatccactcattcccgttcagctggatccgacagatctttccatcgcagatatccagatctgttacctgttttgtaaaacagaatcttccgcccatctgttctatctgttcccgcaacgatgtgacgataccaatcagctgatccgtaccaagatggggtttctgttcatataaaatgtggtccggtgcgcctccctgaacaaaaatctccaatacttttctatgtcttcccaccggatcctttaccagagtattcaatttgccatccgaaaatgtaccggcgcccccttcaccgaactgcacattgctgttcgggtccagaataccgtctttccagtactgatcaaccgttttctttcgttctgatgccttctctccacgctcataaacaaccggtcgaagtcctgcttttgcgagtgcccatgcgcaaaacaatcctgccggaccacttccgatgacaaccggcggctgttttagtttctcagttcctcctgcaggaaattgatattccgttttgtttgttaacataacatttttatcgttaaccttttgcatgcgatgaaggatttttcgttcctttggggtatccacatcaaccacataaacaaatttcagctccggctttttgcgtgcatccagggatcggcgtacaatcttccaggaagaaagctcttctttttttatctttaactgctggcagattttcttctccagtgcatccggagtatgatccaccggcaattttaactgtgaaatacgaatcataatgttctcccttccctggccgcagcttttccggcaactgctccgctcgaccatgcccactgcagattatatccgccacatggaccatccacatcgatcacttctcctgcaaaataaactcccggacagagacgggattctaagtgatccgtcagttcttccggattcacacctccggaacagatctgtgcctgtcgcagtgcgtatgctccttttaccgatacctgccagtcttttaatttctctgcgatcttttccggttcataagttttctttaccagaacatctattatcttcttcggaagcagtccgatcagtaattcctgtggattcttataagtgccattctgccgttgtctgtctgccagatattgtacgagttcttcttttgtcagctttggcatcagatccagatgataaacagctgtttttccttccgcagccccacgcactgcataacggctcagctgaaaaacactgattccggatattccatattccgtaaataaaatctctccctgttcctgtccgatgatttttccgttcacttccaaaatgatgcggccatccatccggcttcctgcccatttcgcataataattgtcttttccacggattccacacaaagacggtaacggtttcactattgcgtgtcccagtttttcggccagtgcataacctgttgcactgcttccctccacatttgacgccggacttccgcaggctatgatcacgctgtcacaggggtactgccaggtagctgtcttcaccagataccggtcatcttcccggagaatatctgtcacctcttccgtagtttttatcttcactttctgatgtcttgcttccatctcaagaacctgtgcaacacctgctgcctgatcgctgtacggatatacccagccaccccggtcttttatatagatcccaagttccgaaaagaatgccagtgtatcttctaatggatactgtgtaatgattttccatgggaaatccggctggctgctccgatatcgggaaggttcctgtacaagatttgtcagattacatcgtccgtttcctgttgcaagaatctttttcccgggtttctcattgtgttctaaaagcgtaaccgcggctcccgcccgggcggcctggatcgctgccatcattccggaagccccaccgcctatgatcacaactcttttcatggaagttctaccagtcctttttcatatagtttctgcaaactcatcataataccaagttttgcatgctgccaagtcaatccgccctggaaatataccgcatacggaggcttgatcggtccgtccgcactcagttcaatagaagagccctgtacgaatgcacctgctgccatgatcacatcgctgtcatatcccggcatcgcccagggttcaggatccacatagctgtcgatcggcgctgctgcctggatgcctttacaaaaagcaattactttttccggtgctccgaaggtgactgcctgaatgatatcgtggcggctctccgtactgttcggaactactgcaaagccaagacgttcatacacgttggctgcaaaaatcgcacctttcagagccgctgccgtaactgttggtgcaaggaaaaatccctgatagaaagactgatttacgcccagtgttgcccctacttcttttccaagtcccggagaagtcaggcggtatgctgcgttgtctacatattctttctttcctgcaatataaccaccgatcggagccagtccgccacctggattcttgatcagagaacctactatcagatctgctcccacatctgtaggctctatcgtttctacaaactcaccataacagttatccaccatgcagatcacatcctgtttgatctcttttataaaatcaatcagctgtccgatccttgctacagaaagtgtaggtctggtctggtaccccttggaacgctggatagttaccagttttgttttctcattgattgcttttctgatattttcaaaatcaaaagaaccatcttccagcagatccacctgtcgataggaaaccccgtattccgccagagaaccgtttgatggccggataccgatcacttcttccaaagtatcatatggctttcctaccggagagagaagttcatctcccggacgcaggttacctgccagtgcaacagcaagcgcatgggttccgcaggcaatctgtggacgtaccagagcggattctgtatggaatgtagccgcgtaaatctcctcgagggtatctcttcccacatcgttatatccgtaaccgctggaagcatacaggcaggcttcactggcacgacactgctgcatggcatgaaccaccttcaactgattatactctgccacacgatcgatctcctcaaatcgttgtttcagactctcagcaatttcctgtccgaaagaatagactttcccatcaattcccatttctttgtacatttcttttgttattgccatatccataattttctgtttttcctttcatgcatatcttataatttatttgaaattttccacgctcacctgattatttttttctctcttaatgaagcaagcatggcatccagaatcacctgtgcatcatacccaaaatcctgcttgtcaaaccattccacctgacgttctctcttaaaccaggtgatctgccgcttggcaaaatgtctggtatcccgttttaatacataaatcgcttcttccagtgaccaggtaccatccagataagaaagaatttctttatatcccagtccctgcatggacaccattcctttatgatagcccatttttttcagtgttttcacttcatcgatcagtccatcggcaagcatctggtcaattctggcatcgattcgttcatacagacgggttctttcatcatttaacacaaaatacgccagattatatggggactctttctggcgctgctcctcattatgctgagaaatcggctttcccgtctgccggtaatattccagtgcacggatcacccgttttacattgtttgcatgaatcgctgccgcagatgcaggatccacagcagcaagcatctcatgaagcacctgcgctccctcagtctttgctttttcttccagcatctgccgataagtcgtatcctctccatgcacagtgaaatcaatatctccggttactgcctggatatagaatccggtaccacccaccagtacaggaatccgcccgcggtcatagattcctttcatggcttcttttgccatctgttgaaaccgtaccacgttaaattcttcatccggctccagacagtccaccagatgatgggggactccctgcatctcctccggccggatctttgcggaaccgatatccatatgacgatagacctgcatggaatccgcggagataatttccccgttcaccgcttttgccagtgcaatggaaaggcttgtttttcctactgcagtaggacctgttaatataatcaaaggtttcttcactctgttcacctacacaatccgcttaaatttcttttccagttcgtatttggtcatggaaataatggtcggtcggccatggggacagttatacggattctccaactgcaacagttcatcaatcagtgcttctgtctcccgaagcgataacttctgatttcccttcaccgctgccttacacgccatggtcgccatccgatccgaaaggacatccagcgtttttgaggatggatcctcctccagatgatccagtacttcaataaaaaatccctgttctgtcattccgaacagattctgcggcactgcccggatactgtattcccttcctccaaaggattcaatctcaaacccaagggttttaaaaatattctgatactttttcattttctcctgttcttccagattcagagaaatgatgatcggcgggctgacgatctgtgaacttacattccgttctttcatctcttttacgattcgttcatacaacactttttcgtgagctgcatgctggtcaatgatatacaatttatcttccatctgtaccagccaatacgtatcaaaaacctgtccgatgatcttgtgatgtttttttgcttccggacttagcagttttccgtcgaaaagatccatctgttcagccttctgaacacccggagcagctatattatctcttctgtctgaaacgacttgttctgccagcaaattcggattctgcttcgccgggttctcattcctgcatccagtctcacgcttttctccgtaacatcccgttccctgctccctgacagccgatcctttgtgagttttttcaccggaagctgccactgctactgtcctgtcagctatcaggttagccgctttcgcacggtttttcagctcttccagctgcactttctgctgcatctgatatcctctcagctgttcgatctgccggcgctgtacctcaaaaggttccggtgctttatcccggttcgcaggacgtaccgccaaacggtcttttccaatcgtcacctgtggaatcagttctttgtgttgcagaccctgtataattgtctgataaatctgtcggtagatcagttcctgatcagaaaaacgtacttccatcttggtcggatgcacattgacatccacatcagagcctttgatctgaatatgaagacaggtaaacggatatttatgctgcatcataaacgtatgataagcatcttccactgcttttgtcacgatcttactctttacatatcgtccattgacataataattttcaaaattacggtttcccctggaaattaccggtttcccgataaatccatcgattcggatcgtctcttcccggtcttttgtatggatctcaatcagttccctggtaatatctctcccgtagatctgataaatcgcttctttcagattattatttccggaagtatgcagtttcgtctgaccgttttgcatatatttgaaagaaatatgcggatgcgacagtgccagctgttcgataaaactgctgatataaccggcttctgtagtcggtgtctttaagaattttgcccttgccggcgtattataaaacagatcccgtatcaggaaagtcgttccgtccggcgcaccgatctcctccattcccttttccatacctccctcaatctgatagcggactccgatcagctgttcatggggttttgtgatcagttccacacgggaaacagcagcaatactcgacagcgcctcgccacgaaatccaagagaagaaatcaacgaaagatcttccactttacggatcttgctggtcgcatgacgaaggaatgccagcggaacctgttctttttcaatacctgtaccattatcggtgatacggataaatgtggtaccgccttccttgatctccacagtaatcgcactggctcccgcatcaatggcattttccaccagttcttttacaaccgaagaagggcgctccaccacttctcctgctgcaatcttatcaattgtactctgatccaagactgaaatctgtcgtttcatcgatctatttccttcctaagctataacatctgctatatttcgtttaccagcgattttttaatttattctgtaaccgatataacgtattcatcgcatccatcggtgtcagcatcgtaatatccagatttttcagttcttctatgatatcctgatcctgtaccgtatcaaacagggaaatctgttccagatccacttcatcataatgtacggctttcggttttgtctttctggaattctctgccagatctttaaatgtactggtaatatccgtatgtaccagttcatccaccagttcttttgcacgatccagcacactgtccggaacacctgcaagctttgccacctggataccataacttttatcggcaccaccttttacgatttttcgcaaaaatacgatatcatcgccccgttctttcactgcgatacagtaattattaacgcccggaatctttccttccagctctgtcagttcgtgatagtgggtagcaaacagagtctttgcccccagaagttttgtattactgatgtgttcgataactgcccaggcaatggacagtccgtcaaaggtactggttccacggccaatctcatccaggatcaacagacttttcgcagtcgcattgcgaagaatattggccacctctgtcatctccaccatgaacgtactctgtccgctggccaggtcgtccgaagctccgacacgggtgaaaatccggtctaccacaccaatctttgctttttctgccggaacaaaagaaccaatctgcgccatcaaaacgatcagggcagtctgccgcatataagtggattttcctgccatgttcggtccggtgatcacggagacacgcttgctgccgttgtccagataggtatcatttgcaataaacatatcgttgttgatcatcttttcaacaaccgggtggcggccatttttgatgtcgatcacaccttttgtattgaccgttgggcgtacatagttattgcgctgggcgaccacggataacgatgcatagacatccagctgcgcgatggctttcgctgtctcctggattcgcggaatctgtgcagccagttcttctctcacctgacagaacagatcgtattccagggcaaataatttatcttccgcaccgaggatcatatcttccagttcttttagcttcggtgtgatatagcgctcggcattggtcaacgtctgttttcttgtatagtattccggcaccagatttttaaaactgttcgtcacttcaagataatagccaaatactttattatatttgatcttcagattccggataccggttttttctttctcttctgcttccagctgtgccagccaggatttcccctgggtttttgaattccgataagtatctacctgttcattatagccttcccggatgatcccgccttctttgactgccagtggtggatcttccgtaatggaggcttctaacagtgtatacagatcttccaggccatccatctgttcgttaatgcgtaccagcagcggactggtaaagttcgccagcagattcttaatatgaggaatcatttccagagacattttaaatgccagcagatctctcgggttcgcagaacgataactgatccgactgaccagacgttccaggtcatataccggattcaggtattcccggatctcctcgcgaagcatcgcctgcatgttcagttccgttaccgcatccagtcgttcgttgatcgcatctgcatcgatcaatggctgttccacaaagcttcgcagcatacgggctcccatggcagttttcgtcttatccaacacccacaaaagagagccgcgtttctgtttttcccgcagggtctccaccagttccagatttcttctcgaagaactgtcgataaccatatagcggtctgtagtatacgggataattttattcatatgctccatggtatttttctgggtatccagaagataccggaacagggaaccggctgcgatcacaccgctgtcataatcagccagtcccagcccctcaagagaggaaatcttaaaatgctccagtaatgtctgcttacacagatcatctccaaaataccaggattccagtgcaaacacagagatatgcagacggttcctcagatcgtccacatccacgccggagaccagaaaagcatcattacagatgatctctgccggaaggaacttattgatctcatcccagagtttccgctcctcatcaatctctgtcacatagcaatcaccggttgtgatatctgcagtggatactccaaaatgatctcccacacatacgatggccatcagataattattctttccttcatccagttcctgcatattaagattcgttcccggtgtcacaacacgggtcacttctctttttacgattccctttgccgttttcggatcctctacctgttcgcagatggctactttataccctttatcgatcagacgattgatatatgtttctgctgcgtgatacggaatcccgcacatcggagcccgctcagaaagaccacagtctttgccggtaagtgtaagttccagttcacgggagacagttttcgcatcctcaaaaaacatttcataaaagtccccaagacgataaaaaagaatcgaatccttatacgcacattttgtctgacagtaatggaccatcatcggtgataatgtatcactattttctggaatccccataaattcaagctcttccggggttaatgcaggtgcttttgacccattttgaccacgttttgaccacgttttttttgtttcttgtttcaatatatctatacctcaattcttttctgttagagagtcctttttatcgttgaaaagtacatatttttcttcatatttctgataagaatgcttcagatgttcctgttccaggtgcgtgtagtattccgtcattttcagatctgcatggtctgtgatcttccggatagaagcataatccataccagattccacacaatgagtaacaaatgtatgccgcagcatatgtggactgaaatagatcagatgtggttcccgatgttcttctattgccagcttttcttctttccggtttaccatatcgatgatacagcgcgtttcctgataggccgatcctggcagataaggatttcccggggacgtagtaaaaaccagatccggcaatacatcagccaggggattttcccttccccatttcttccgatattttttcttatcctcgtcctgtttctttttccagtctaaaaatgcctgtcggacttctgcattcattgggatcatccgataacttgccttctttttcggtgacgttacctgctttttccattgacgctacggaagtttctggttagactcatcataataaatatagactttaccaactgtttttcttacatagattaattcgttttcgaagtcaatattactccatccgagcgcacaggcttccccgatccgcattcccgtatgaaaaagtattacaaaaaggttcataataccgtcttctctggcagacttcccaaaaacgttccagatcctggggactgatgcactttttatcatcatccggtattttaccgggtcggtccttggaaaatcggatcgtatcacatgggtttgtcggaaccagacctctgttaaaagcgtgttggaacaactgccgcaggattgacagggcctgtagtacagttgtcctggcatacccttcttttagtaacgaatcgatcacaaacgagatcgtcgatggagtagcatcgatcagtttgacataaccaatatattcccgcatccgttcaaaaccattcacatagttctgaatcgtggtatttttattgactgggatgatataaagtctcatccactcctcataccagacagatacattgatctgtgggttgtatcgttccgccaacggagctttctttttcttaaactctcttgttttcttttttaatgtggaaagtttccggtcatagagacagtagggattttttacgcctggtatatacactcttgcttcaaaccggccatctgccttctgtcgaaatccttttcccagaccatttccttctaaatcttttcccatatatttcaccgtctttcttgatgaatacacatggcactcgttttaatattagcatggaaaaaataaactttcaagactgactcaccagctatttctcgaattttttccggtctaccagggttctccgtccgatccggacaagcaaatggttctcttcgatcaggtttcggatcgtcttttccgataaacctgtcagctcacaaacttctttaacggatagcaataatttttctggtgcttctttttttcgtaacatatccttggtcctttctgtcatattttcaatcatacggaagtatccggagatgcacgcgcaaggtaagcaacagcttcctgcagggaacaattctgttgttttgccctggaatatacactgcttttctttatccccagttccgtacagcaactttgtacagaaggatagactttaccctgatagggaaaagaccgtttttttcgcagggacaggacatattccaacgcttctgcccgactgatttttcggttcttttcatgatagatcacagtatttggtgaaatatcgtatgctttgcagcaagaaaaaaaatcatcataaattacattccggaacaggaaggccttatccatagaaatataatgttccaatgcctcttcttttgtgatctcgtaatacttctgatagttacgtacagcgtcatagctgactccatgtaatttacaacattccaagaaagaatgataggattcaccatgaaactgaaagaatttcttttggtcggtcacatcctgctttgttgtatctgattccactttcgaaccttggaatttacgcacaacttatacaagtggagaaaagatcaccttctggtcggcctttttttcgtacctgcaattgcgatcgacactccccctactcatttttttccatttctttttcgatatcgatcccggtcttctccttatatccccgcactatactccgcagatccatgtatcttgtgtaatacaaaagttccagttctttctccttttcatagtttttcttcgtttctcgcagttctttccgtagctttgctcctgtccgcccgtccgcaagggaacgatatgcttccattttgaagtataacgatcggatcatgctctcccgtagattctgttccctgtattctgaaatattctggatctttgctttccgtaaagaagataactggccatcattcgcgaccagaatcccaacgaaatccggaatcttatgtacatagtccgtaatcttttctaccatcgattccggaatgaccaggtaattgtaatgtccataccagctcatctttgcagacgactgcaggtcagtcttctttccctgcagacccgttccaaagtctgctcgatttctagtgtctgttgtgtttttgccatccttacaacaccaccttttcttcttttgccagcagcatgtctgccattttcctcgtcacatatgttaagacttcaaactgtgtatggtcttgtgctgcgtaggaatccagcgagtcttcctcataatcgaatcctgtcgattccagattttcctcattaacctttaacagcttacatacagcatcatacagatatgcagcactgtggtctttcagcagaccatggttgacgcagaagatatacatatgttccgctgtttccgctccgatcagatcccgtaccatgtccacggtgtatcccatggaaagaattccggaataaaattccaattcgtcctgctgggaaattacagcattcctgaacagccgttttaatttttcttccgggtcatacgccttgcagtttctcttccatgcaacgatctgcacggtaacagcttcctcttcatttatccaaaaccactggttgttctcgcagtacgcaaaagcgtcgcaatggtattctccatcgacacatccaagataagtcacctgcacattttctctttcttttgggtaattctctgagattacaggggtccatgtttcactcatatttttctccttgtaagattgtatttcagacgatttttttaactcctctctttatatatttgtctgatacctacagaatgggaaatctcgaacataacaaaaaccagggaaaaccctggctcttgcaaaaaattaaaaataaacaatgaactttttgtcacgattccaaaaatcataagctttttcgcattttcgttccttattttaatggtaaacacccatcttcaaacagtctttcgaacgtgtttggagtatgttatctcttacattataaaagtatcgttctatatcgcccggttcattgctccaagatttcgtgaacagaaaatggaaacagactttcactgtttacagcagcatcataaaacaattgatcttgtgaaatcccgtatagtaataataagcgatcatccaccaaaacagaatactctggcgaatcattacaataaatataacatgtgattaaaaatcatcccttatatgataagggacattttccggaagcttttctttgcttaactcatcagctttgcacacccggataaataacttgtctttaactgaactgtatttgttgtaattagaatatatctttaaccttgtcttttcggaacaatcgcatttccatagaaatattggtataagaaaataaaccataacgatgatcaatatagttgtacagattacatataagtaggcaaaacgtatgaacgcagccaaaatagaacaaatacaaggaataaccatgaaaaagcttatagcaatagctatgttgtagtgcgtaaataagccatcataacacgaaaacttcgttccaaccactcttattttttctccatcttgacagagggaattgccaatttgcaatcccctccatgtacaactattctactattctttatttaataatatactatctttgctttttcatccagcaccatctgataaaatctttccgcataaacatacgcctgttttaaatctgccatttctttttcctgagaattgtatttagtcccatactgcagacacacttcaaaatcagccggtaaatcaataggtgcccgcgcgatccaataagcaatctgattccagtccaatactccggtaaatggacatctatgtttatccgcagccagtactttttcatcattatccagatcttccctcggtatggaatccgtatcctgtaaatgtgtggcatacaggcgatcataatatttctccaataactcataataattatcctggaacatgatacttgcatgaccggaatcaaaacacaatcctataaattcccgatcgtatcgttcaaacagcctttcaaactgatccctctgatcttctgccggagcaaacagcagattttccactgcaatttttacacctgccgtttttgcatatggctgtacctcatcaaaagatttaaatacctgtttataataatcttttttagcctctttacacttgcggaatactctgaacggtaatgccatatgcaacaccatagtatctgcaccaatctgcgtacataaatcaattctgtttttcaaaagctctacacccgcttcccggatatatggattgggacttttatagtctttccgaaaacttccctcggtcgcatgaatcgtatgcgcttttagtccgtaatgccgcagcagatcccgtgcataaaacatttcacttggactataaagatattcaccatcccaattatgcatccatgatgtatgagtaaaaccagtctccgcaagacatttgatctgatgttctatttcatcccaattttgtatatcattgttataatcagtgtttactgacgtatatagcatatttctacctcctgattcatatatgaatttatgtatttgtttcgttttttccggcctttttgtaaaaagtcggagacactccataatattttttaaatgcccttgaaaaattaaatacattattataaccgacagcttccgaaatttcctgaagattcatggttggacattgcaataattgctccgaatacaccattctttttgaaatcagatactcctgaaaggacaccccatatgtctcatggaacattttactcagatgtgaataacttatgaaaaacttttctgctatatctgaaagcaccagtttctcagtaaaattctgatcaatatattcgcagatttcatccataatatttccctggctttcttttctttccatgaaatctacatataccagaatctttcgttttacgacttcgacaaaatgttcaatagaagtaatatcataaaaagaaatggaatctgtatccacctccagtttttctttatctgaagatgatattgccgaatagataagaccagtaacaaaattataatatctcttcaattccgaaatctgaagcatgcggatctccacttcaattcgtttccagatatttgtatgaagcattagttttggattctcaatcaagttagaagtactctttcgcaatctctctcgtatttccatggattttttctgctctttttgagaaaacagctttccatatccttccgtcatccgatagcagagattattttcacattcataattcaaacggtatatttctgaaatgcccccacaactactgataccaattgcaggcattcccaaacctttgcttataatctcctctatcaattgctttccatagatcagcagcacgtcataatccatatcgtcactagagagcagaagctcaattttttgacgcgtacgagccgaacacaaacactgatactccttcttatcatattccagatcatatatcagattaattattttattaatatcttgttcagacatcgatctttcaaaacctattttaacaatacatattttccagtcatcggtttcactggggatttctttctttagtttatccagagtagtttcatccagcggtctggacaattgttcaaagattttttctgccgttgtaacacgcaaacttcttgattcaccggaatagctggtcttattcaacagacattcacactgctgttggagcatatcatgcaactgttttgtcagaattggtttcagcagataatctgtcaccccttcctgaaacgcttctcgaacgtatttataatcatcatatccgctcagaacgatgaagcacacgggaaaaaggatttttttcatctgtcgaatcatttcgattccatccatcccttccattttgatgtccgtgattacaatttccggtttatagtctctgcagatttccagcgcttcttccccactgtaacaagttttaacctcaccgatttctttcatgttcatcatctttatttttgaacatatattttcgcagatatgatattcatcatctacaactaacactgaaaacttcatttcattcactttcttcaaaatcctttattggtatcttgatcgatacaacagttccttcttctatcttactgtcaatcaacaattctgcctcttctccataaatcaactgcagccttttgtaaatatttcgcagtcctataaaggaagaattagatgaaatcgtattctccagttgttttccttccacaatattttcacgaattttttccagatactctttatcaacacctgttccgttatcttctattttaatcacaagaaattttccaaaataccttgccttaatcctgatccatgttcgttgattctttttcgcaccatgcacaatagaattttccaaaattggctgaagcagatactttattatctccacaggatataattcctgaggtacatccagctccagttccaaatttccttcacaacgaatactgtatacctgtaccagtgagtatgcattatccatttcttctttcacagtggcaaacattcctgtattttttatattataacgaagtaaatgtccaaaataagcaatagcctccgataatctaaaattaccattgtcctccgcattggatgcaaaaatactcagtgtattatagataaaatgtggattcatctgatactgcagagccttaatctgcgcttcttttttgtcactttcctttttgatcatatcggaaatcagagtctgaattttattcaacaagacattataacgcatagtgatggtacggaattcatcacattcatcaacagggatctgtccttcaaatccatttgccacaattctgtccatctcgttgatattcttgttgattttattcataatatatttaatcaaaatatgaagacacagagcctgtaccacaatgagcagactgaacaatacaaaaatccgaagagtaagtatgatgtaactgtttttctcaattgcgtttctgtcaatcactaccaatttataattcttgatataactgtacagatgtccaaaagatacttctgagaagttcaccgtgttttccgcaacagaagactgaatggctgaaatcacgttggtacttaacggttttccccaaaagtccttggtattggtaaaataaatgctatattcatttcgcttgttttcctgaagggaaagcaaaaacttttccggatctatttcaaaaacaagcaatcctgaataaacatcgtcctcttcattccggatatcacgaacaaaaagcaacagttcatctatagatgcattcatatctttttttgcaaaatacttttctgtcgtttctttatccagaaagtagaaatcagcacctttctgctgttcatgaaaattatcataaaaatcaaatccatacaaaagcgatatgttgtaaaaattctcctgattgcataactcatttttatttgtatagatatctatatcttcaattcccctgttttgatattttaatgtatagtgtaatgcatctataatttcattactggaacgcttcgtccatattggaaaattttccagattatttctggaaatcagagatgaaatgggacttcggtaagccaaattctgagacagcgtttctaccgtcgccagtgaattctgaatgttctgcgtcaattgctccagagccagctgcttgctgcttacagtctctgtgtatagtttctcatactgaaccatcgaaagatagctgaccaacataaatactggaaaaatgactacaactgtataaatagttataatttttttaatcagagacatttttttcagtttttcaatcatttctttcataaatttcctttgtccatatattataatttcatgtagtcatcataaactcagctatcttttatgtcaataaactttttactttctaaaactcagcttccattccgtcccaggcaacttcaaagttctctttttctgcccattctgtcatttctttataaagcatctccccattgtgagaaaaatgtacacagatccatttggtatccgaatctgtacagcccatatccatcaacttatcacgaatcgccagattatgctgaaatcccatatggtttggatcgattggatgttttcccatagtgcagtccagactgacacagtccagcttttttccttccaaaaactcccatatttcatcgtaaaacatgctgctgtcatttccataaagaattgtttttccgtcatgctcgatcagataaatcagggctgtttctgttttcatgtgttttgtcggcattggataaatcgtatagtcttcaatctcaaacttttcaaatggttttacctcatggaagtgtagataatcccagatttccggaacgcaaaatctgtctgctgcctcttttaaaagacttccaaccacatcatttccataaatatgtaatacctctgctcccatatcatgcccataaattggcaggcgcatcaacagatcaaacggataaaaatgatcatcatgtgaatgggtaatcagcagatgggcgacgattgaaaaatccatgttgtaatgctgaatatgaaaataactgtctgccggaaaatccaccaatattttatcatcaatgattgcctgtgaacgtgtcctgagttctcttcctcctctttttcttgcctcattacaaatcgcacatctgcaaaacagtgccggtattccttcggcagcgccggttcccaaatatttaatcttcattattatttctcctttcattattattttgaagcccagtattgatccagtgctttctgtgctgtttccttggcaatccgcaatgcttcttctgccggaatattttcaatctctaccatatctgccgcatctttcagagcctgatcgatttttccatttgttggatctgagaagtttctctgtgcatattccagctgttccaacggaacccttgcctgtggattttcttctaggtatgcctgaaatgcttcatcttccaatgctgcagtccttaccggcgtataacctgtattcatcgcaaactttgcagttccctgtacacttgtcaaataagaaatccacttgaatcccgcttctttttgttcatctgaagccttgcttaaaattgcacaggtgatcggatcggctaccggtgaaggagcatgatcaccaaatcccggctgaatatgtgctgccagtttatcgaaatccaaatctccctgatcaccattggaaccaatatatccggctgcgcgtccctgcataacatcatcaattgttttataccaaaactcccatccgtctccgccggaatgaattcccatgatctgatcatcgtgaatccattttcgaattgcttcccaggattctacccactccggtgaatcaatcaataccgtcttcccatcatcgctcagaacctttcctccgttgctgaatgctatgtctttcagattttccacaccatacatgggctcccaaccatagaaaaccgtttctccattttcttttactgttattttttccgctgtttcagccagattctgccaatttgcaaatgcttcatccggatcaattccattttcttcaaaaacagctttgtcataatacattacctgtgttgttccatataccggaagaccgaaaatccttccatctgcatcctgacagtaatccatcagtgattctaccagatcttctttatggaattccggtgcattttcaatataactgtccagatattccagagtccctttttccgcaaactgctgcagatactgattggtaaataaaacagttgccggtactttaccggatgcgattgccgattgtaccagccgcttggtttctgcatagtcggactgctgtacccctgtcactttcacttcatcctgtgtctcattaaaatcattgataatggattccatggtttcaccaagttttccgccaagaccataccaaaattcaatctccaccacctcactgcctgattcttctgatttagtctcaccggaacctccacatccaacaattgctgtaactgccatcattccgcacagaaatagacttatcatttttttcttcatattcttcctcctgttctttttctattcttttacaccagaatcactggtgattccttttataatccacttttgtccaaatgccacgatcaatattaacggtacaacaactacacaacaagcagccatgattgacccccattccataccataagctccatatccggagaaaaatgcttttaaccccatactgacaaaatatttctccttatctttgataatcagggacggccacaaataattattatagtttccaataaaggaaagaattcccaaagtaaccgtagccggtatagacaacggcatcacaattctccagaaacgttgccagtgccctgccccatctgctttcgctgcttccatgatagagctgttgatctgcagatatgttgtacgatagtaaaaaatattaaaaatacttgccgaacttgatacgatatatcccatgtgtgtatccatcaatcccatttttgaaatcaggatataagatggaatatatgtagaagccgccggcataatataggttaccagaattaacatgtagagaatccgacttccacggaaacggataaaaacaagcgcataagcaaacatggcagaattcagtaatacgatcactgtacagatcactgcggtacttgtgctgttccacatatagttaaaaaaatcgccctcccgcaatacattgagataatttatccactgcggtatcttcggcagcacttcgggaggcattgcccagatttcgtcttttgtttttatggagttactgatcatccataaaaaaggaaaggcaatggtaaaactgcttactgccaaaaccagatacagcacgattttactaatattattctttatctttttcatacgtcacctaatcataatgtacatattttttagataccactgtttctcctatggataacgcaacagtgattaatatgataataacggccactgcagaagcctttccggtattaaatgcttcaaatgcttccatatagaaatagtataacaaagttcttgtcgcgcctgcaggtcctccctgcgtaagcacctgaatctggtcataagcctgaatggaattgatcgtggtgatcattacaaggaaaaacgtggtcggtgaaattgatggccagataattctgatgaatttgacaaatcctcctgctccgtctattgatgccgcttccatgatattctgcggaactttttttattgcttccacataaaatatcatcgcccaaccgatctgtttccatacggtaacaatgactaccgaaagcatggccgtatctgaactttgtgtccactgtagttccggcaagcctacaagagcaaataaataattaaaaattccaactctcggttcaaaaatccaggaccacacaatacttaccgccaccatcggcgtaatgtacggagaaaataaaatcgttttaaaaaagccaccccgtttcactatacaaagtgccaatgcaatcagtacaccaaataaaatggtaggtataatatttcctatggaaaaaaacaatgtattttttaatgttctgtaaaattccggatcccccaacagacttttgtaattatccataccgataaaattgatttgcgcagatatcatatcccagtctgtaaaactcagtccagcagaataaaataccggaccgatccagaaaaggagcaacggtatcagagcaggaaggataaaaacacaagctgcaagaccctcctttctattgtattttttctttttcttcacatttttcccctctttcttttatttttctatcttctctgactgtattttaagtatagcaactaacgttttgcaataacatatccttttttctgatttcatatcattttttgtttccttcctttttcgtcagatttcattcccaaaaaatgatatgttttcactaatgaagatatgttttttgacaatttccaatgctatactgatgtcactttaaaaagtctggtgataaagggggggatttttcacataccagcaacaaaagaaagagaattttcaattcacaaggaggaaaaaacatgattcactttaaatcaaaagcgttacagcgctgggtagttcttatcgttgtatctctggtaggcggcatgattactaagcttccatacctgaaagacatctatttttcaacactgcaggctgcaaccggcacaacaaaaacacagttgggattactgcttaccatgtatggtcttatgaactttatctgctatttcccgggcggtatgctcgcagataaaatctcaccaaagaaactgattgtattttcctgttttggtaccggtgccgttggtctctggtatgcaacactgcccggatatacttcattgttgattattcatgctttgtttggtattactacagttttcacattctgggcttctatggtaaaaatcacaaacaatctgggtaatgaagatgaacagggaaaactgtttggatttctggaaggtggacgtggtctggtcggaacacttatcgccctcgcttccgtatttgtattttctcagtttgtagatgaaacaaaaggtctttccggcgcaatcgtattctacagtgttatgatgatcgttggcggtatcctcgtaatcttatttgttcaagatccaaagatcagcgaagaagatgtcagcactgtttcattggaagatttcaaagcagttgctaaaatcccaagagtatggctttgtggtctcatcgttgcatgcaactatcttgcagtaatgatttttggttacctgacaccatactttactgaagtttactctatgagcagttcctctgccgctcttctgggtgttttccgtgcttacgttatgatgatggtcggttcactgttcggaggactaatggcaagcaagatgaagagtgtaatccgttttatgcactacggcttcatcggaatgacgattttctcattctcatacctgctgattcctgttaatagaggaatgctgccaatcgtagtagttaactttgttttgcaaggtctgttccttcttgcagttaaggctctgtacttcgcacctattgatgagatcggtatctctaagaaacttgccggaaccgcttccggaatcatctctgtagtaggatattcccctgaaatcttcggatataccgctgccggttctattcttgataacaacccgggcgttactggttataacattcttttcattatcaccggctgcctttctattataggttttgttcttgttattatattaaaactgaataacagaaaaaagacggcagtaaaatctgcaaactaacaaaaaaggatcccggcctaatagccgggatttccctttctgtctttctttcacttgccttgtttatttcttatctgcactatactcattgctctatccgatttattgcattatctattgtcacattttttcagtattgccgacactgaccgtacaagtttctccttttataagctccggtgatgaaaatgcataccactggatacttttctctgtaatgatctcatccatctgttttcctacactgtcttttaatagaatagctgttcctgcttccagagtctgacctatattccatacaattatgggctgttgggaatcttcatcaggattctgtgccattcctacacttcccactccacggaatataccgccatcaattttgcatgtaccgccaaaatccagcgttccattgccaccattggtcggcccatgaactgtcacatcaccgccagtcatgagaatgtctccattggtatccagtccgtctccttccgcatttacatatgtaatcttcattgttgcttgcatcctatgttatcgctattttgaaaatcaatacaattctaacaatccataccacagttatgcatataagaagaattatatattgattagttatgtgcgttactgtatcatgatatacttttatttctgattttcattttgttgctccacatccactgcatttatacccatttggaacctgtttggtcgtttctggactatcgacaacggtttcatcatacgcatctttcacaagtactctttcgtcatatgctgcctgatcggttacggtcttggttccgacctggacctgatcgcagtaataaccatggccagtttcagcaccatgagcatccagtgctgcatcgctagtaccaaaatctaaaccacaattacaaatatagtgccactcataaatcccttcctcatgcgtcactgcatcatggtgtacggtcttgtattctgcatcgtgatgaactacatgggttttggctggtaccctctctgtcttgtactgctgtacccaggtgtgggtatgcgctgcttcttgtttcggttcctcggttggcttcgaacttggctttctggcaacaggtgtgctacttggttttgtagaagctggagtttctgttgccttgactgtcccagtatctttcttggtctctttcttagaatcttttttcgcttctgtcttagtgtcagcgttggactctttgctgtcagtctttgtttctttctttgtatcagtcttagtttcttctattgctatattgtcttctgtgctgtcctctgcgccgtcctcggtcgtttccgtgttttcctcgtcggatccggaattaacctcttctttggtctctgcatcgatcacggctgacccggttgtttctgtacttttctggatttccggagtctctgctacactgctgccgtcagattttgcaactgtcgtgtttccatcactgataatgatctcatcctggtctgcaagcttggtagcatcatctttaccgaccacggtcacttccttatcgaccgaaataacgggatgatcatccacggtataggcactgtcaacatccccttctaccggttccgcatttttatcagcttctgggtctcctgcctcttctttcaccaccggttcggtactggcagtatctacggtcaggtactctgctaatttttctgcattgacagttactttataggtgacctggtaagtccctggtgtttccaggtccatatcactttccgcttcaatatcttccacgatatcaccatcataagtgatcccatgcagcaggttcgggttctgtgcgccttccactactttgatatctcccattccggctacgacatcactgaggtctgcttcggtccaggatacttcttcggattccactgcttcatcctttgttgtggtctcttcttttggttcatccttcactggttccttaccgcatccggtcatccccacggccaatactcctgctgctgccatcagggctgctctttctatgttcttcataatcttctcttctttttgttttgatagtttatttgttactatcagcatccagaattctttctattctggattttttcggacaacggttttttgtggttggtattggacgattatgttcggccttccgcaccgttacattataatcctataccagctctttcgcaagcattccgtaatatttccggtgagtatactgaaaatttatttccccgttcccggagactttttagaggaaattatgaatgagaggaaattggtaggatattgatatctccggacacgttttgttacgaaaaaaggtagggaactctgattttttgaaagaaaagcggagagttttcggagaaaaggaagactttttcaaaaccttcccataaccttcctaaataagcggggacttttaaaactctccggaaaaaccaaatagtctccgtaaaggaatggattttggtaagttatggtcggtatactgataataggttacagtgagcaggaattgatgtttcggcaactctattttgggtaaaaaaacagccgggagaatcccagctgatctatttggattaaataattatttactatcctttttttcaatttttctgtaatcgctttgatggcatttctatctgtttttcaaaaacctccattttgatatgctctggcaattacataagaaggctcatagtaagcactaccattataattatcgattacatcacaaatgggatcattgtagattttgaatatgccatctacataattttcttttaaagttaaagtatctgcaataagtctttgataaacagctcccatttccagttctgtaggaatccgagttaccaattcaggatcgacatcggtaatgtcgaattttccttgctgtaaggaataatcatgtttccagtcataagctaccttatctgaattttcacaatgtagaacatttgcgcaactaagcaaatgatacatttcttgttcgccaatggtatttactacataacaattatgttgccgtaaacttctagcgactttttcaatcatatagcagataaaaaatagatcgttttcaaggatatcttcatccgggaaataaatgtttttcataatttatcgctcccttcaaatcgtaaagtttttaatgcattttctgtacaaaataccatctggtgtgttggataagagaatctaaccaattcccagaaagctttccttgatatcttttcttctaaaaaagattctacatagttccaaatttgatcatcagccatgggaccttctacaatatcgtaattgtgttcaatgccctttctgcaaagaacaacaaagtccaaccatttttctgtcatatgttcaaaactcagaattcgtagagaatcatctggctgataggaataccagttcaaaacagattctcctcttcttgaaatagcccaacgctttgcctgttttttatattttgtgcagtaaaagccataaccaaaatccttataaaatccattctgtaaaatttttggttcggcaacctctacattacttccatgaaaaataatttcagccatatcattcgcctccaaaatcatctgtcattaatagtataacaaatgatggaattatcatcaagcagcactttccaaaacagtcctgtctacttcctcaacggctgccagaaggaaatcatgaccgaacttccaggcttcgctgttggtggagaaattctggtattttctcgttaatacatccatctgagataaggtgtaggtacaaagctcatccactgataattgttccacttttacacccagaacatcctttaaaagaatgtaatagtctttcaaaaaggctttatattgttcttcggagagtttgggaatatagggacggcggaccagttcatggtcaatggccaatagaatcgcagatgtgtaaggtttggggtatttgtggtaaaaaccagccgtaccatgataaaagatacccgaagcgttttcctccggggctgtgaagacctgatgtataaagcacatcagatccccaaaaaaattgtaatagtatccatttttcgcaaaatcagtcttcattgaattccttcctctcatatatgcgtgtcgctacgtacagaaaaccgatacctgacgctactaaaaaagcaagccaccagtcagaacaggttgtgaatttttcttcggaaccggcatataaaagcaggattccaccgatggccagacaaataccatccatcttgtccttgattttctttaagttttccataagtatagttcttccttgccggaatattgggaaaaccatagcgttcctcctatccttccatcctttgacgcagggtgtctatcgacagagcagtaaggacgagttccccattttttagatagatcacagacgcgatctttctgccataggtataatcaaagacaagtccttcttttttttcgacggacatccagaaccactgggttggtttcatagctgacatacagctttacattttctttcgggacatagcaatctcttgttaccttgacatctgccacctcttatcccccctttctgcttacatttttagtatgggaaaaatcgcaaaaaaaagaagaggtcagtcctctcctttttccttcgcaaaacagtatgctgtgtcctcttttttccgggacgaaaggatgtgttccgaagcatcttcttcgtccagatcgcagctccattccgtccaggactggttctgtttcttcatccgttcttccagcatattttttcttttatttttcgttttcggtttcctgtgaaagagttttcgaatctgatcgcgcatagtcacatacagataaaaaacgatcagaaatccaacgaccaggaaacagatgaaaaaaataagatctctcatagcagcaccccctaattatcataatcattcgaaaaatcgatctggctgtaatccaggtcttccggctgatagagtcccttgtcgatcgcatccctgtcttcttctgtcaccccgttctcaatcatctggttcttcagggattcgagcaggtcagagatatcatccggcaggtcgtcttctgccatgacactggataaggtatcctctggaaggtctacgccatcttgctgtgcctcatagatcgcatcttgtgccatgtctgcccgttcctccaggtcgtccaggaaatcttccgtctctgatagatccatatcttcttccggaaaatctacatagtccaggtcttcttctacatcatcgaaagacgggtcaaaacctgggtcttcatagcggtccccggtctgatcccacagggtatctgtatcttcctcagagatcccgttgtcctgcatggcagaaacgatggtttccagattgtccataggtttcccgtccagatccgagatctcataagcgatatctgctgatgcctgctggtaataatctcggtcggcatcgggcgcattcgaaagtttttcactgatcgagtctgctgccgcctgcagaatggtatcataatcgatcgattcatttccaaagatatccttggcatatttatccacgctttccggctgatctactggcattttcgcaccttccttcccctgcggatcctgttctttcttttcaaaacggtcttcttttggttcccggtcgacctctcgttccactttggaaaagaacgggcgatagattgttttggcaagaagatcaccaacctttgcccattttccataatcgtaggtggtatcttttaagtaagaatctgtttcaaactgttcagaccctccggttacaatccggtcacggtaagactgcatataattggttcttcgcagttccatcttgtcctggaacaggctgttcttgctgatatactcttttacgacctgcccatctccccaggcaatacctgaatcgatcagttttctggcacagaaatcatattccatcttgtactgctggtaaaaggtgttcgtccggaggatctgcggatttccgatgcgttccaccatgccgttcatcttgccagccagctccttcatccggttcacgactggttctgcatcttttaagataccatctaccagcttctgtttttctgtgcccgcacccgtaccgtttctttctgcattggctgctgcagtcttttcgatctctgccattttggagttccggatgttcatttccccgccaaaatccacctttgcccggaccatatccggcatccgtttcagggtatccactatccgcacggcatctgccttggtatctagctggacagaatccggctgttcttccatcttttcagcctttgcttccaggtcttcctttcgttcttcattccgaagaagacatctcctttacagccatggaaaagaagcggacgatccagcagccgatcaatggatttcttttcccgacattccaggacggctgtttcgatatacattctgtcctgtattttgcaaaaaaagaacttcatgcagaatttattaccaacgggcttacctgcgaattgccactagaagaatctgaccagaaggaatacttctcttccgctctctccatggctttcccggatgattacacattagaaaaagccgctgatgtatacaaagaagtacagaagtgcatcgaagaagaacaggatctcaggaaaaaagaattacggaacatcatggaaacttgtgttgctgaagaagaacggctgaaaggattcgatgagaactatccggagcattttacactgcatccaaagaatattattgatgagaaaaattatgtgatcaacggagatgggattactttgaaagtcactgcggaccatatggatctgttggaatataaagaaatagacgggcagtcttacttatgcattccggtctctgcggggctggaaaaggacaacttaccactcaaagaaaaaaaattgtaaaaaagaaaaggacagctgaaaggctgtctttttttgagcgctatgtgaaaaatttttggttgttttacgaccatgttttgaccacgtaaaatgataccaatgggtaccactccagggcatttcataccatatcggatctatttttgtcttaaaaactcctttctcttttcaactaatccgatttcttcaagttccctgtttatgcggtttgtcaacatgatgaaatataattcattaattttttactagatacatatacttagtagatgattatcggcgataatgacctgctgtcttgcggaagtcccagttttataagggtttccggcgttattccggcctcttcaaatacatttgttgatatttttgagttcaaattataaaatacctctttctaatccattgtatcattctcttccacgttcatcttcctgtaaatcattttccatgattttactgttatttacagggataatacatgacactccgtactatattagcattttgacaattaactttcaagattgcttcaccgaccattttcgaaatttttgcgattcataccagaaacaggcatttgaaaagggccagtccatcacgactgaccctctgcttattgaatatagcttccaaaaaacttttttaatcaaaataaattgtcttaccgctctttgctgactcatagattgcttccagtacacgggtgacaactgcagcctgcgcaggttttacaatctgttctgctccgtctgcaacgatgtggtagaacagttcctgctcatagtccggtgcttctttctcttctcctgagaagaatgctactccttcgccgaataatgccggtttctctactacctgtttgttgtggtggatgtagttgatccgcaggccgtctttcatatctgctccggcttttgttccgcacagacttgtcttggcctcatcaacttccagtgtgttcagtgcccaggctgcttccagctcgatcactgcaccgtttttcatacggatgaatccgaaagcggaatcttctacactgaattccttgggatcccagtctccaaagtcatttccctgattggtctggtcagccagtttgcggaaggtctgtcctgttacagactctacttcatagttgtccatcatccataaagtcagatccagcgcatgggttccgatatcgatcagcggaccgccgccctgttcttcttcatttaagaatacaccccaggtaggaactgctcttcttctgagtgcatgggcttttgcaaagtagatctctcccagttcgtcagccttgcacatctccttcagaaacagggagtctggacggtaacggttctggtatccgatgttcagaactctgcctgttttctctgaagcctccaccatcttctgtgcttctgcataattctttgccatcggtttctcacacataacatcttttcctgcttccatggctgcgatagagatctctgcatgggagcggttcggtgtggttacatatacaacatccaggtcctctttgataagctcctgatagtcttcaaatacttttgcatcttctgtgccatattctttttttgctttctctgcacgctctctgatgatgtcgcagaaagctacgatctcatagagaccacttttcttcatagccggaaggtgttttccgttggcgattcctccgcatcctacgattcctgcttttaattttctcatggtattatctcctttttattccgtagtaactattcagtagtcactatcccgcgagatgttttggcatgaacacgccaagattccgaggcatacaagcaaaaatgccagcaccgaaggtgatttcatatgcatttttgcctgtaactgtgaaggtactgaacagttacctgtagtcaataaattttatagtcaagcggatattcgcaatccgcttcgcagtttattcgatcaaatcacgaactgttccagatatctcttgctgaggatcagagaattctcaaccttttctttggaatcttcaaaagccttatcctcgatctcgatacaggtataaccgtcatatccgatgtctgtcagtgctgatacatattttccccagtccacatctccaagtcccgggatcttcggtgacatgtattccagcggatatgccatggtgccgcaggattccagtttgtctttatagatcttgatatccttgtagtggacatggaagattttatccttgaactcataaagcgggcggatataatcgatcatctgccagataaagtgggatggatcgtaattgatgcccagatggtcactgtccaggatccggaatacttctctccagatcggcggtgttgtcatcaggttctgtcctcccggccactggtcctcgccgaaaagcatcgggcagttttcgatggcgatcttcacgtcacattcctcagccagttttatgatcggcggccagatctcttttaccagttccaggttctcctgtacatttttggtctggtcccttccgataaatgtggtgaccatgcccacacctaatttcttacttgcaaggatcacctgcttcaggtgttccacagcagctttgcttttctctttgtctgcagccatcacgtttggataataagccagtgctgagatctccactcctgatttctttgcatattccacgatatgctctgcatatgtatcatcctggttgacccgttctgcatcgatatggcttacaccggcatatcttctttctgctttttcctgtggccagcatgccacttccacacactcaaatccctgttcggatgcaaagtccatcatttcttcataggtccagctgtcaaggatggctgtgataaacccaagtttcatagaaataccctcctgtttcttctgtctctgctatatctttgttaactgttcagtatccactgtgaaggtactgaacagttactatctttgttatttctcccatggagttggtgtgaactctccgcctctgcaccatttcagatagttcagtgcatggagctgtccggtcatctccagttctccgttgtataccggatcatgatatccctcgatacagatatcgtcctcatatccgttgcttcttaagatagaaatgatatctctccagtttgtgtcaccaaatccaggcatacggtgccatacgaatggaactgctccggagattccgccgtgtcttactgcatcccagtcgatggtcgcatcttttccatgtacatggacgatctttttgcaccattttctcagctctgccacagggtcgatcagctgtaccatctggtgggtcggctcccattccagaccgaagttgtcattctttacttcctcaaacatcacttcccaggctttcgggttgaaaccgatgttgcaggtggcatgttcccaggttccatccatcaggcagttttcgatacccagtttcacacctttttcttctgcaaggtctgccagttcacggaacacttttccgaactcttcgtatgcggattctaccggttttccttcccatgctcctgcaaaggtgcttacgtgggtagctccgaacttttcagcagtgcagatcaccttttccagtgtctttctgtgctctgcgtactggatcgggttacagtaatatccgagtgtagtaatcttggaatctgttcctgcaaggagtttgtctgtggtcagtgccagtttgtcaagatctgttccttccagtgacatatggaaattaagggaaaatgtttcgaatccttttccaacaaatcctttcaaccattcttctgcaacgggtcccggcacgcaggttccgattttaatctgtttcatacttttttcctcctgttctgttacatgcactctcggagaacatgtacaactggtttcaatttttatgttatatatgttctgcttatgatttctatctatagttattcagtatcttcttagttacacctgatcctgaaattcgatcacctggtttgtctctgctgaccggaagattgcttccatcagtttcatcacgcgcatcacctggaacagcttgatctcaggttctgctccgtcccggatcactgcaactacatttctgtggaaatctgcaatatctccggatacttttggtaagtcttctttcacaatggtatcttcccgtctcggtgccatggtctttgtcagaccggctgctgtcttaaccggtactaccgtctcttccgtcctaccggtcttacggatgatctcaccgtttaactgccagtcccggatcactgcggtaccgtcttctcccagtacataccatctcggcagggaaatataattattggtgccgacttccaccaggacttccgttccaccttcaaatgtcaagatggcagtgaagccatcgtccacttcctggttggtgacattggtaagtgatgcgtatacggtctcgatctttctgtcgccgtacatatataagatctgatccagcagatgtacgccccagtccaggaccattccgccaccatggaccttttcttttctccagtcaccaggaattcctcttgatccatggacacggctctcgatccggaagacatgacccagtttctgctcctctaccagctttttgatgatcaggaaatcatcatcccaccgtctgttctgatgtacagtaagtaattttcctgtctctttggctgcattttccatctccagcagatctgcggaagataatgtcaccggtttttccgatattacattcttccctgcatgcatggcacggatggcgataggtttgtggcagtcattcggagtagcgatcagaaccacatcgatatccggatctgccagcatggcttcttctgtttcatatacaaaaaagcccttctccttcgcttcttctctcttttcttccttgatgtcatagatgccaccgattacagcttccggaacattggaaaggatctccgtatgccatctgcccattccgccatatccgatcagtccgtaaactactttgttttccctcattttacacctccatatataattatcataacgttactgttcactctgtgcccagtaacacgcttcgcgatgtacagaatttatacgaatcgcataaatctttgcgaacaactatcaactatcttatgttttctcagatccggtaaaatcctgctgactgtgccggaacagttatttttccatttttagcctctgcggctgcgccaaagttatagattgcttcttttggctctgcatcgcatgcaaatgtttttgcctctgcggctgcattgatgatcacgaggatcttctcatcaccgtcttcacggatgtatgccagcggatatgcattcttttctgcataaacaaaagtgatctttcctcggctctgcagagctttgtgactctgacggatccggatcagttttttcacttcatgatacagagaatccggagctgccatctctttctttgctgttggccgatctttatccggatccatggcaatatacagatcacttgccggtgcactggaaaaacctgcgttggtgctgtcatcccactgcatcggagaacgagaaccagtacggttgtaaccgccttctacagatttcagtccttctacataacgcataccgatttcatcgccataatagataaatggcgcacctggcatagacaggataaatgcaaaggccactttcaattcatcaccgtgaagatggcgtgccagacggtctacatcatggtttcctgaaaacatacacatcagacctttaccggctgtcttttcacagttttctttataggattctacgaaatcatagatatttccttttgcacgggatgaaaaatacggctctttgcagcggaacagatcgttggaatgtgaggtaccaaactccagcagaaagtccatgtggaatcctccctccagagatctctgtggatcaccccattcagataccattgctgcatccggaaattctttatcaaggaattctctgatctgtttccatacgcggatggttccttttttctccggatcatttttcaccagagactctgccatatctacccggaagccatcacagcccatacccagccagaatctcattacatcttccattgctgcgatagttgcctgtggtccttcatcgtcgatcgactgctgccacggtttctccggatccggctgatagaaaccatagtttaatgccggctgattggagaagaagttgacagccaccgcaccgtcacgctcagagatacctctcagagagccgccgaagctgacctccggtgattcccatactttatcggtccagatatagcggtcggtatatgggttcttatctgctttcatggattcgatgaaccatgggtgttctatagaagtatgtcccggcaccagatccagcagtacatgaaatccttttttatgtgcttcttcaaataactgtttcagatcttcgttggttccgtaacgtggagctacacgacagtaatctgcaacatcgtatcctgcatctccgaacggagagagaaaacaaggattgatccataaagcgttgcatccaagttctctgatataatctaatttttcgataataccctgaaaatctccgatgccgtccccgttagtatctttaaatgcctgcggatagatttcataaaaaattgcattatctaaccattttgacattttgtaaaaccctctttctttctgatgttgtctcgtttctctataacaactaccttcgcttatcagaatactatttattttcttagatttcaaacaatatactatttttttctgatactattctattatttttgtataatgttcttgtgtttcttcttatccatatatttttttggttatttttaccctttatttcattctcaaaaaataatttatattattttgcacagcaaaaaaagggttcctgatgccacagattttcattctgcaacatcatacccttctctgtttccgttgcaacacgtatcattatatgatatattacaactgattcttttatatttcccggaaacagtattctttgcaatactatcctatgattttaattattctgccggagatatttattttacggaggcgtatgttatgaatctttatgcgataaaagaaaagtgccaacacggatccattcaggttccatacagttactatgactgcggtataccggattattttacgagtgtaccgctgcactggcacagtgaaatggaattaaattacataaaatctggaaatggttttttcaaatacgaggatcagaccatctctgccaaaccgggagacatctttctgatccagcccaacgtccttcatgctatcatgtcggatgagcacagctcttttttttatgataccattgtttttcatcagaatatgctggtgggaagttacgatgaccgttgttatacagatattctgctgccgatcttttcttccagacgaagagttctggtccctgtatctcaggaaaccccggggtatcatgaactccatgattcggtccggactattatgcagtgtgcgcacaaaaatcttgcaacgtcggatctgttgctgaaaagcgaactgctccgcttattttatctgctggcatcgacaccgggactctgcaccgaacacacggcttcgacagaatcccggctgaccgaaacacttcggcctgttctcacttatatacagaaacatcattccgaatctgttaccatagagcagctggcaaagatcgctcatatgagcagcagttactttatgagctgtttcaaacagaatttcggtctcggagccattgaatatctgaatcaggtacgtatccgatcagcatgcgaccttctgcgcaatacggatcgcaatatctccgacattgctttcgataccggatttcataacctttcaaatttcaatcgacagtttcgcaccaaggtaggatgttctcctcagacttaccgaaaagaatccgttctttcctgatagatccagtaagtgatcatcaacatgatccaggcgccgatccaggcagatacttctgccagagcaacaccacgaaaagccagatatggagtcagcagctttaccatgaccactcgaagagacacttccaggactcctgaaagcatcggaacaaacgtatgccccatgccctgacacccgttgcggaacacaaacagccatcccagaggaaacagacagatgcctgtaactgccagaaaatctcttgtgtaagaaataatcgacgcatcatttaacatgaaagaagtcagaaactcaggaatacacagcaacatcagagccagtggaatatttatcaggatcgtcaggataactccttcccggataccggtacgtatccgctccttttttccggcaccataattctgtcccacaaaagtaagaagtgccaggcccactgtatttgccggctgttcaaaaagaccgaggatcttggtgcatgccgcataggcagccacatagcttgttcccatattgttgacaaatgtctgtaataccattccacccactgcagtgacagaattcataacggcaaccggcaggccttttaacgtcagttttttgatgatcacaccctgtggttcccagtccgtttttttcgggatcagatttttttcctttcctatgtagtaacagcagtaaagcgcagacagaacctgtgccagaacagtggctaacgctgcgccaaaaacacccatatgtaacgggaaaacgaataacagatccatcagaacattagcaatggcggaaattatcattgcaaccagaggcaccctgctgtttcccacggaacgcagaagtgtcatggcaaaattattaaaaattgtaatggtggttcccgcaagaattgttccgaaatattgcagtgtttccgtcatcagatcttccggtgtatggagaaatgtaaataattgccgcatgaaggccagacttaccactgtgatcacaatcccaacggccagacagatccagacagacattgccagctctttacgaagtttttcataattgccacttccaaaagactgagaaatacagattcccaatcctcctgtcagcccaattgcgaaaccaatgatcagaaaatgtacggaactggtgtttccaaccgccgcaagtgctgtatcgccaattccttttcccaccaccatagagtctgcaaagctgtatagctgctgaaacagatttcctgccaggatcggcagaaaaaactgtaccagtaaacgcatgcagtttccctgcgtcatatcatttgtcgtgttcttacccattatgttacctcctgatgtctaaacggtactttccaaatactgtctgcttttagccagtattttactactgaaatgatactttttccatgacattactattctgttttgatactattctatgatgttgaggtaaaagtcagagtgaacagtaacattttctattctgcaggcgttcccatatagtagaatcccttgcatacgtccagatgaatctgtttgaatgtgccaatcatagaagcatctcccgggaaatgtaccagaagattattgcccattcgtccggttaccagagatgcatcctgatcgttgacactctctaccagaacttcctgtaccgttccctcaaaacgggaagaacgttctcgtgcaatttcctgcacctgcgctaaaagacggtcaaaacgatcttttacaacctcttccggcacctgatcctctttggccgctgcaggtgttccgcttcttttggaataaataaaggtaaatgcgctgtcatatcccacttttccgactacatccatggtctccagaaagtcttcttctgtctctcccggaaatcccacaataatatccgtcgtcagagaaatatccggcaatttctcacgaatccggtcaaccagtgccagataggactcttttgtataccgacggttcatctcttttaacacccggctgctgcctgactgcagaggcagatgaagatgcggacagatctttttactctcagccatcacctcgatcagttcatcggacagatcctttggatgagaggtcatgaaccggatcctcttcagtccttcaatcttttcaatctcttttaacaactgtgcaaatgtaatcggatgctccagattttttccataggaatttacattctgaccaagcagcatgacttccaccacaccgtccgctaccagatgttcgatctctcttacgatatcttccggattccggcttcgctcacggccacggacatacggtacgatacagtaactgcagaagttgttgcatccaaacataatgttgacaccggatttgaatttgtattttcgatctaccggcaggtcttccacgatctgatcggtatctttccagacatcgatgatcatccggtccgattccatagcataacacagaagttccgggaacttgaagatgttatgggttccgaagatcagatccacgaaccggtaactctttttcagtttttccaccacatgtgcttcctgcatcatacagccacacagtgcgatcatcatatgtggcttcttctttttcatgctgccaagatatcccagacggccatagacacgctggttggcattctcacggactgtacaggtattgtaaataacaaagtctgcttcgtcttctttatctgtcttgatataaccgaccgcctccagaataccatccagtttttcggagtcgcgggcattcatttgacacccgaaggtagtcgtacaggcatataacggacgtcccagttcttctgatttttctctgacatagatgcgggctttttcaataaactgctgctggcgtttctgttcttcagcagcggtaagagtttcttttttattttccatctttattttcatcctttcgcaactgcagtttcgctcctgtttttcagaaggcagtcacatcgtttttttcgtaaataatggaactgagcgaatagcgcgcagttaccgtgcaatctattattatactggatggtaagggtaatttcaatgaattttttgacctttccttccatctatagtattataagatgttgaggtcaaaaggtattttgacccctttgataccggattgttccgtacttcgtacttccacaatcctcaaaaacattcgtaattcgctcatttttcttcgaaaaatggctacttactcatgtttttggcaggtcccaagatcagaaatcttcctgcaagcaagcttgcgtcagatttctgaccttttgacctttgtatcatcataataaaaataattacttgattcacaagggaggattacgatgaaacgaaaaaaaactttctacattctccggtatattttcgcagttgtactgatcattggcggacttggcaatctgtcttcttctgttccgttcggcttatgcgttactcttgccggagtgtctctttttccatttatctggaatctgattcgtaaaaaagcagcgattgcccgatgggttccgcttcttgtgccgcttttgttctttatcgctgccacaccgtttaccccggaaagtgcagcgcagtccagaacaattgccattactgatgaggcctctgacacaccggaagctgttgtaacggatactccggagattacacctgcggaagttccgacagacactcccacaccggagaccacaccggaagaaactgcaactcctacaccgacagaaactcctacaccggagccgacaaaagaagccggtgagatgaaagttcattttctggatgtgggacagggattaagtatcctggtacagtccgatgggcagaccatgatttatgacggtggtgataagagtacttccagttttgtggtttcttatctgcaaaaacagaatgttaccaccattgactatctgatctcttcccattatgacagcgaccatatggcaggactgatcggatgtttaaatgcttttgatgtaaaaaatgtaatttccagtgattatgaacatgacagtaaactgtatcagtcctttatccagacagttgccgacaaaggacttacgatgcagcatcctgcagtcggtactgaattttctttcggaagcggaagttttcagatcctggctccggcaactattgatccgaatgacagcaataagaattcagtggcgatcaagctgacaaatggtgataattcttttattttcaccggagatgcggaaaacaccagtgaaaaagccatgtgtgaatccggcattgacctctcctgcgatgtactggttccgggacatcacggttctgccacagctaccagctgggattttctccaggcaaccgttccggaatatgcagtgatcagctgcggaaaggataaccagtacggacatccggataaagatgtgatggacaagctggaatccatggatattcatgtgtatcgtaccgataaacagggcacgatcgtcgctgtcagtgacggaacaaccatcacctggaaccaggaaccgtgcaatgactacagcccaggagataaagaggataagggaacacaggcacagacgagccaatcaaaaggcagcagttcttcaggttcgaaggcaactgcaaatgaaaactcctcttccggaaataaggaagtctctgctgcaagtgcaggtgcttccagccaggtggaagccaccccacaggtaacagcggctccacaggatacttcttccacttccaacgaagaaatggtatggatcacagctaccggatccaagtatcataataaaaataactgtggcaccacagacccgagcaaggcaagtgagatcagcagggcagaggcggaaagtcgggggtatgagccttgtaagaagtgctttagataagtatttttcgtttttaaaaaatatcgaataaacctttctgtaaatcataaaaatgcatcttgttttcaatgtaaagctctgtttactgaaaacaaaatgcatttttatgatttcatatttccgaatcgttatctctattccactgtcacgctcttcgccaggtttctcggtttatctacatccagtcctttcgccacggacacataatatcccatcagctgcagcggtatcactgccagtgaagttgcaaaatgtggatctgtctttggaatatacgttacaaagtccgcagtatcctcaatattataattgccgtatgtcgtcagtcccatcagataagcgccacggctcttacattctaccatgttgctgacggtcttttcatacagtgccggctgggtcagacagccgatcaccagtgtaccatcttcaatcagggaaatcgttccatgtttcagttcacctgccgcatatgcctcagagtggatgtagctgatctctttcatcttcaggctgccttccatactgatggcataatcaatgccacgaccaataaagaaaatatctttcgcattgacctgttttgaggcaaaccactgaaggcgttctttgtcatcaatgatcttctgaatcttttccggaagcgtctgcagctctgcaatcagaccgtcatattgctcctgtgtgatctcctctctcactttcgcaaactggatcgccagcaggtaagaagcgatcagctgggtactgtaggcttttgtggttgccacggagatttccggtcctgccagagtgtagaagacattatctgcttctctggcgatggaagatcctatcacattgacgattccgagagtacggacaccttttgattttgcttcccgaagtgcggcaaggctgtctgcggtttccccggactgactgatgataatagcaagaccgttcttatctaacagtggtttccggtagcggaattcagatgccagttccacacgaaccgggattcttgcaaggtcttccagcacatactgtgctgccatacctacatgataggcggatccgcatgccacgatatagatctgactgatgtttttgatttcttcctcggaaagccccacatcgctcagatcgatcacaccatcatgcagaacagaattcagcgtatctgctacagctttcggctgttcatggatctctttgatcataaaatgctcaaatcctgctttttctgctgcttccgcatcccattcaatgactttcggctgtttttccacctcatcgccatccagattaaagaacgtaatctctccttttctgacacgggccatctccaggttaccgatatagtaaacatttcttgtatattttaagattgcaggaacatcagatgcaataaaggactctccgttttccaccccaaggatcatcgggctgtcttttctcgccacatagatctcttccggatactccttgaacatgattgccagggcataagagccacggatacgaaccatggcatgtgtcagggcatctaccggtgtgccttcgtattttttataataataatccaccagtttgacagccacttccgtatcggtttctgaatagaaggtgtagccatttcgaatcagtttgtcttttaattcctgatagttttcaataataccgttatgaacagctaccacattgccatcatcgctcatatgaggatgtgcattattctcagaaggttctccgtgagttgcccaacgggtatgcccgattccacaggttcccggtacagagtcgccaccattagtcttgtcgatcagttttttcaggcggcctttggctttgatcacctctgcctgtttttccccgtctctgactgcgataccggcagagtcatatccacggtattccagcttggacagtccatccagtaaaaccggggctgcgctatgcattccggtatagcctacgattccacacatattattatttctcctctcagatcgtttgtgttactgcacttgtttttcgcgattatgcatatacactcaccattctgcctgaagtacccgacagaacagtatgttctattttacgccacatgacctttggcttttactacgccgactacctggtcgacatatttccggcagcattcttcggtctcggcttccaccatgacacgaagtaacggttctgttccggattcacggaccaggatacgtccggtgtctcccagtgcctcttccactgcttttaccgcagctttcacatccggatcttcctgggcagctgtcttatcgactactcttacattttccagaacctgcggataaatagtcagaccttcggtcagctggctcatctttgcttttctcgccatcataacttccatcatcttcagactggtcaggataccatctccggtggaagcgtattttgagaaaatgatatgaccggactgttctcctccgatccggcagccgttctggttcatatattcgtatacatatttatcgcctaccgcagtttttgcatagccgatacccagttcatcgaacgctttataaagaccgaagtttgacatgaccgtagttaccacggtgttggtcagaagttttcctctctctttcatgtattttccataaatgtagagaatggcatctccgtctaccagattgcctttttcatcgacacacaggcagcggtcggcatctccgtcgtaggcaaatcctacatccagtccgttatctactacatatttctgcagtccttcgatatgggtggatccggcgttgttattgatgttggttccgtccggctgggcgttgatcacataggttttggctcccagagcatcaaatacggctttcgcgatattccaggaacttccgttggcacagtccagaccaaccttaattcctttgaaagaatacataccaagagaaatcaaataaccgacatagcgatttcttcctgccacgtagtctacggtacatccgatccggtctttatgagcatatggtacttcttcataagtttcaccaaatacttctacttttccgtccagatagtcttctacgagagcgatggtctcttcatccatcttttctccgtttccattgatcagtttgattccattatcataatatgggttatgactggcggagatcatgattccgcagtcaaaattatcggttcttgccacataggcaacggatggggttgtggttacatgaagcaggtatgcatctgccccggaagctaccagaccacctaccagtgtgtattcaaacatatagctggatctccgggtatcttttccgatgacgatccgtgccggtgtatcatccccgtttctgcgtttctgttctccgtagtaccagcccaggaatcggccgattttgtatgcgtggtctgcagttaggttttcattggcttctccacggaagccatccgttccaaaatatttacccatttttcttttttcccttcataatcacgtccggctgtttgtttcagccttggattttttcgtgtgtttgtcggttactttcatgtttttattgcatgatatatcaataattggtccagcagagcaattttgattagattttttgtaaattcaatggttctatcatagtacaaatgggggaatgttgcaagtactttcacaaatttcgtggatatgtcatctgaaggacgccgaaagaacccggtttccagggtggactcgcgtgggcagggcaactttaagctagtcgctaacttcggctatgattcacgagagtcagctgaccctcgcgaaagcctacgtaagcgccggatctcaaagcttgccctaaccgcccacacagtgcgagtccaccctggaaaccgggctctttcggctgagtattggaaacgacaaattggattcgtgtatcgtttttcatacttttaaaaagtaatgtaatatatattttattttttttcttttatatatttcttcgcatcttttaagaaactacctgtaatcagcaggattactgctccaatcgggaaggcagccacaatactcacactttgcagattgctcatggagctttccgcaaacagtaatgcgatcggcaatgcgatcagcaggaggcaccacatcagctggattccccgatggggttgttcgccttcttctagtttgcggtaactgtagcaggaggctgtcagggcaatggagtcaaaggaagttgcgtagaaggcaaccatcgtcaacagtactattaccatgataaccggggcacagggcatggttttgatcatggatacgatcattccatagagatcgccatctttcaggtattgtgcgataaaatcagcttttccggttacctgcattcccatggagtaattgccgaggatgataaaactgatcagagtagatccaacgccgaaaccataacctcccagaatagtctggcggacggttcttccacgggagatgctgccgatgaaaaacggtgctgccacacaccagaccatccagtatgcccagtaataaatcgtccagttctgtggaaagtttgaggttctcagaggatccgtaaaggtagaaagaccgataaagttctgaaccatggttcccagtgaactcagacctgtctcgatgatataacgggtttcacctccaaacagaaggacaacagccagcaatccaaaaaagagatatatacagatatttgccagtctgctgatccccttaaatccgtggagtaaagaatatgtatatacagcacatgttaccagtaaaataatggcattgataactgtccggcttactgtaatatgaaaaagctctccgatgatcgttgccatcagcggtgttgccacactgaaggttgttgccgttcctgcaagcaaggcaaatacagccagaagatcaatgattcttcctgcccagccatcggtatgtttccctaggatcggacggcaggcttcagagtatttctggcggtttctttttcgtacatggagcataaaaccaaatgccacagccagtaccagatagaatccccacgggataaaactccagtgaaacagcggataaacgcctgcccattcctggatgcttcccatctcttctaggtgaggatctgtcgcatataatacccattccgagaaagagtaaaataaaatatccgctgcaagaccgcaggtaaacatcattgctccccaggaaaagaaagagtatttcggcttttctcctttttcaccaagtacgatatcgccgtatttcgatcctgcgatatacagagacaacaggaaaatgccaagtccgatcaccagataatatgttccaaaagtatctccgaagaaaaaccggatctggctcagaactgcatttgactgatccggcaggaggaaaaacaggatgcacagtgcaatcacgattccaagaggaaccagtgtaatcatccagtcgatctttccttttgtatttgttatatttttattcatcactattttactcctttttttgtgtataaatcacggtagctgttatccagggcaatcagctcttccaggttatccacctcgatcagatcacccggatgcatcggtcggatgccaagccggtattccttcggatagcagaacatcgccacatcgtcccagtagatctgtctgtttttcttttcttcaaattccacttccagatgatgtttcagtcgttttccatcttctttgctccatcgggagatgctgtacagctgccagccacccttccctccgtttctgctgcaggaaacaacgattccgtcttctacctgctgcaaccattcatccgtctcttcgtccgtccagatactgttataaccggaacgttcaaactccggagaaaggattgttctgttatacacaatctgatcaccatccaggatcatgacattttctatatgatcccgcgctacatacagtgaagaaatgttgttgcaggtatcataataaggattttcaataattgtcacacccggatattcctgttccagcgtgtaaaactgttctttcagataaccaaccacaatataaatttccgtgattccattctcatgaagaccctgaatcactgtatcgatcatccgcacaccgttgactttcaccagtggtttcggtgtggtcagtgtgactggccgcatccggttgcccagaccggcagccattataattgcccgttctgctttattcatgattttttgctcctttgatttgactgagttcttcctttacaattctataatactctttcgcatatcggtactgccgcagcgaatactcgccaaactctacacccagactttttttatactcacaccagttgctccacaaaagtccgcatgctgcgatatagcagtagatcttgatccggatctcatttttgcacccctccggaaaataagcatcgatcagcgcatccacctgctccctgtcatacatcgcataaacagcaaacatggcaatatctacatgaggatcctgcatccctgcgtactcccagtctatcaggcggatctcctcttcaccgtttttttctataaacagaaaattatccggcactgcatcgatatgggtcagtaccttttccctactccactgttcaatatatggacgaagttccagtacatgctcttttgtcttctgataatcccggtaatctgagggagtattaccccacagcttttcgtaaaactccatctgcccgaaaatatcaaaggtatgctccacctgcagtttcatctcatgaaaccttctcaggcgcttcatgcatttttccacgtccctgggactgtcaggatcacagactctcgcaccttccagaaattccgtgatcttgtatccattctccggattgatatatgcaatgtcatcgcatattttctttccgtcgatggtctgataaactgctgcttcttccctccggtcaatcagctgttccgttccctcaccggggatgcgcataatgtattttttccccttggttgtaaataagaaggatctgttggtcattccctttttcagtacggtgatatcggtaatctcgtcctgttttacaccaagtgcctggcagatcacctggatcgcatcggtttttaactggccggaatggctgtcaagttcccgcagctgttcgtatgtattgatttctacaacatccgaaccgtgtacaacccttgcagcaacgatcattttatcttttcgatataatgcttcctcccagaaaacaccgtcatatcgcagatccctgctcagcttttcgatattttccgcaacgatacctgcttcttccccggtcagataacagattccgatcattgcattgccgccatttccttccggaaccgtgaccagttccattttccggttgacgcggacagaactttcattttccaccaggtcgctgaccatgtaccaggagtaagactcgtaccggtcaaagggattccggtcacaccagatgtcgcagggaatgatatacgcattctccagatggcgtctcaccagcctgacagaatgtaaattgtttttcgtcatatagtccggattaaccaccagttccacaccaaactcatcgattagatactcatatcgctctttcataaatccgactaccacatagatctcccggatcccgacttcatgaagctggcggatctgccgctcgatcagaggttctttgttgacttccaacagtcctttcggcacctccgtgttgatgggaaccatccgcatcccgaaaccggctgccaggataatcgctcttttcggagatcgctcctgaaattctttctttgcccgggaagtcggccataactgctcatccagatacccctgagccaccagttctttcaccgaacgattcaccacccccagcgaatgtccggaagcttctgccagcatccgctggttgataaagggagtctgtaataatattttcatgatatcgctttcttgcttgttcatatacagtctgttttctccttttgtgaacatttgatttataaatagcccggtcttcacctggaaaaccgggtacgaattactcttgccatactttagcacaataaacaggatttgtcaaatgatctccctgattttctcctgcagaatctttcccaccacttcggaaaactgctgaatattctcgatccgcacaaaatctcgtccgaagatccggtgggcggtctggagtccgcgctctgtccccatgaaaacacctacgacctgaatgcctttccttttcaggtgctgtacctgttcggtcgtgtcttccactgcaatctgatccgtgtattctctgtttttgtaaaatgcaccctcggctgcgatcctgtcatcctgcggactgccatcggtgaggacaagcaataacttcttctcctgttcactgttttccatcagatgaccggctccccgaagtgccagtccgtcgcggttattccccgccgccacataggaaaatacctcttctgcccggtctatctccccgtaagactgaaacaaccgcaaaaccgtatatccgcgaatactgcaataagaatacacctgtagcggaatcctgcaaagatccagacttttcacaagaatataggattgcgctgcaatctgttcctgactgtctttccgggaggaggacgcatcaatcagtatatctacggagaaccctgcatctgacacctcttctcttttttcaaagattcttggatcctccagatacagtgctctccatacctgactggcacagatttttccctgtctcgcccgtaaaggaacgtcatcaaggcgggtatccagttccagacggagtttttctgtcattctgcggatactgttctcatagatggttcgacttttctcgtaatactgccgatttttctctgtctgtcttctgcaattctcccggaactcttgaatctcctttgcctctcttctgtcaatcttcttttccgtttcagccgctttttcgttccaccgttctccggccggagaactagccttcgaatatccttcggttatataaatatggctgtttttatgattctctgtacacaattcttcttccatcagtttttcttccccgggagaacagatactggaaccaaaacatccctcaatatacgcccggtctttttccccgtctccctgcctggaaaactgaaacagataatgtctggctctttccatggttcctccgtttccggactcttcccacaccggatcgtcataccgctttgtcttcacgtaggtagcatgcatcttgccgatcgaatgaaatgcaggcagcagtttttgcaggaaatacgtcccccgctctttttttaccggcttcggttcataagaaaaatatttccacaggatcactttcatcctggcgatgatctgttcgatctccatatctccggtaaacgtcagttcctgaagcagttcttccattcttccggataacccggagtcctgacccagaatagccgcacaatgtccgtttcgcagttgatcaatcagttcatattctttaaacgaacgatacctccccagattttcctgtgcatattcctggcgaagatccgtaagtgccggccgatgcgcctgttctttttcgtataatgcctgttccagaccgatccacagcatcccctgatacagttcctcctgcctgccaccgagcatatgaaaaaatgtttccagtttttgggcatcataccacttataactgagaccgataataatattcagatacatatccgccgtcccatccggtgcataggcgagaaacagcggttccagcccatactgttccgccgctgcccaaacaaaatttctcgctctccgttcttcctgcatctcctgctgttccatgtctttgcactgtccttttattataatagagtgtttatgcgaattcttttctgcaagaaccacatttttcttcaaataaatcttccgatttcatcttttttgagattcgtccccgaatcgtatcctgaatcagtgtctgctcatatgggtcaaaggttttattggtaattcccatgtccagcgcatcctgtacgttcaatcctttttccatcagtgccacaccgtcaagaagtccccgaagatccatggcacgggaagaaatctgggcattttcacactttttctgaagatccaggtagacggctgccagttcttttgcaccttcagttttcaatgtcggatagtgatcctgtaataacaaaatcaggtgttcctgcgagatcatcggcatccggatcaccacaaagcgggaaaccagtgcttcgttcagttcttttgttcccgcatacccatagttcatcgtggcgatgaaacgggtggccgggtgcaggtcgatccgctcatatcccggcacatcgatgcttcttcgaaagtccaacgttccatgaagtaccgccagagcttcactttttgccatattaatctcgtcgagcaccgcaaatccaccatgctgcgccgcacagcagatcggacccggacggaaagttacttcctgttttttaaaagtatccataccgatcagggatgcagcatccatattgacatgaaacgatacatcccaccgcggtcttgcgaatgcggcggcaagattttccgcaaaaatatttttcccggtggctttatgaccgacaagcaaaatattttttccgcataaaagtgccgtcactgccttttcccagatatctgttccataataaatattactcggaacgggtatcctggactgaaactgtggctccacgggatattgttttcgaaattcaagtatggactcctttaattctggtctgatctgcagatgctctatgatatcaaacaccattgattacttcctttctgtttctttctgaaatgctgtaactatcatatcacaaatctgttatttgtaaaatcaatagatgcatctgtttcttcctcggaaatttcccggtgaaaaatgcaatgaagtagcagacacttccgtttactaccatgccaacgacagctggcctgcccatgctcctgtctgtatgtggtttgattatggggttctgaatgattttctgaaagaatgggtagttcaaatggatgaactgaaatccggtgtgattaccagagatgaatattttgaatggaaaattaactggccacagacctgcgatggttgtggaaaatatgagccgaaaaggcagtggcaatctgccaatgcagaacttagtgaaacttaacaaaacttaaatttattatgttttttctctttaaccaaagaaaaagcactataaatcgtgatcagcattagtccaacggttttcagtgcttttttcatattgctctattgaattttcctcattccaactctataggtgaaacttagcgaaacttaaattatgcctctttcagactattaatttagatattcaccaactgtagattatttctcagtgcaccagtttccaacttaccgcctgctgccttgcatccacaaatctcttataaataccttcctgtttcattaattgctcatgtgttccctgctgcacaattcgtcctttgtcaacaaccacaatctggtctgcatgtctgactgtttttaatctgtgggcaatcataataatcgttttttcctttgtaagtgcatcaactgcatccatcagctccttttcattctccggatcaacattggccgttgcttcatccaatatgacgattggcgcatccttcataatcgctctggctatcgaaatacgctgcttctcaccaccggaaagtgtagctcctccttctccgatcactgtatcgtatccatctggaagtttgcttatgaaatcatgacagcacgctttcttcgccgcttccaccacttcctcatggcttgcatcctgacgtccgaatttaatattattctcaatggtatctgcaaacaaatacacagactgaaatacaaatgaaaaattacgcatcagactgttcatactatagtcttttacattcacgcctccaagtgtcacttcccctgaatccacatcccagaatctggcgatcagattgcaaagtgttgattttcctccaccagatggtccaacaatcgctgtcgtcgttttctgtggaatagaaagcgatatatcatcaatgatcttccgtttgtcataagaaaacgaaacattagaaagtctgatatcgtaattttccggctgtatttctttaccgtcgatatccatggtatccagctccaatattgcatttgctttatctacacatacgcttaccacatgtaaaagagatgaataatttcctgcacattccagactggcataaagcataaatgctgaaattgtcataccgatcgcatagaccgcactcatagttccattaatataaaaatatgcactgcaaaccacgatcacagcacctgtaattttggttatcacactttgcagaaaatgatagggcacaaacaacatttccatctttgtattgatcttttcacatgcttcatttgcatcatttaatcttttcgcctgtttcccaagcaagttatatgatttaacttctgatattccctgcagatactccatgatctggtttacaagctccgtatcgcataccactttttgctctgaatcttttttacccgcattctgcatcacagaattgaccccaaagaaaataagtactcctgctgcagctatcagtccgattctccagtcaaaaagaaacagcataaaaatgatcattgatgtttccagaatcccctgcatggtcagcatgaccactctcgcagccacatcgccaagaatttccattgtattggtcgtaacagaagaaatttccccaatactgttagcattaaaatatcccatcggcagatagcgcagatgctctgcaatcttgattctcataaaagcacttgcattatatccgccttctgtctgaagcactgtagagtatctcttgcagattacgtcgactacaattgcaagaaccataatcgcaacggagcctccaatatattttcctgtcggtttcccactcagcagaccaatcagtatgtacataatagccggaatcttcattgctgaggcaagagcctctatgagtccgatcactatcgacagtttaaatttattgccattttccctgcctgaaaaacgaaagaattttgccagaatcccaaacatatcattctccctccttcaccgtatcttttacagaaatatgggcattccacatttccttataaagctggcatgacaccagaagttcctcatgtgtgccatgtgctgttacatttccatcatttacaacaaagatctggtcactgtccttaacagtagaaagtctgtgtgcgattacgatcagggtcttccctgctaccagttttgcgatagaattctgcagaattgcctcattttccggatctgtgtaggcagttgcctcatcaaggatcacgatcggagcatcctttaacattgctcttgcaatggagatacgctgcctctcgccacctgacagatgtcctcctgcacctcctacaaccgtatcaaatccattctccaactgcatgataaattcatagcatccacttttctttgtcacctcgatgatctgttcatctgtagcattcggatttccctgtctgatattttcacggaccgtttcattgaacagataattgtcctgtgcaacatatgcaattttccggttaaaatctgcaagtgccatttcttttacatcaactccaccgattttgatgcttccggaatccacatcccacagggacgcaatcagctttgcgatggtcgacttgccgcttccggaaggtcctacgattgcatttaccgttcctgctttcagctccatagttactccgtgcaggatttctttgtcgtgataaccaaatctgacatcttcaagagtaacggagttatcttttggaacacttttacttttctctggacgttcaagctccggctgttccagaattcctgccacttcaccaacaatcactccgatcttgccaagatcatctgtataggaaccaactgtgatcaacggtccaacgattccaagtgataaaataatgcagatgacaaaatctgaaatcgcaagtgttccattggctacataatgtgccccaaacggcaataccgtaagaagcgtataaggtgtgaccaccatcatcagtccatgaaagatcgagcaccgtttcatccaggaaataaaagaatctgcatattcaaaagccgcctttgtaaattttgcataagaactttctgtctttccaaatgccttgatcacttcgattccgtcaatatattccactgccgcatcattcagatcttttgttgtctgaaccgttctctcgaagcttggtttataatccagcatcattccaaaataggaaagaaatcccactataaccggcaccaatgaccagagtgccagtctccagtctgtcaggaagaaataaatcaaaatcacaatcggtgccagcagattggacgtgaattccgggacaatatgcgccagtgttgtctcgatactgtcgattctttccaccataatatttttaaatgtaccggaaggtgtgtctttcacatagccaagaggtacccgcgccagcttgtcacagcaggattttcttatatttgcaagtactgcaaacgttgctttatgtgacaatgctgtcgaaagtgaatgaagcagttctgcaatgataaacgataatgcaatcagaaccgcttttgcaagatatatttcaaactccttttcaccatttaaaaacagctttactacatctgcaataataaaatacggcaaaatcttaaaaatcacatttcctattgcaagtaacacactccacacataggcaattcttttttgtccggcccacgtcaggatccagctgactgccgacttctttttttctttcacatctgttcactccttacgttcgttttattgttttaccttctgttagttcgtgctaaccagcatataataaaataggtggtttactggcatcaaccacctgatattattatcctgtctgaactttattcagaaatccagaacctgcaacacacataacctattcagaattcctgcatcagttatactggaaattcaatattccacaatcgttcccagccacctgtattgaattctttcagttgatgtacatttttctttgcagtctccctgtctatatcatgctcaatgatctgaaatactgatgaaaaaaatcccgtatagatcatatgcataaggctttcctctacaatcggtattttcacaccgttctctttcatcttttccatataattcaagctggacttcatttcccgctctaccatattgtgtatgaatagttcaaattttccactgtctccacatttcagcaataatctgaaattatcataatgatcatagatataatcaaccatctgctccatcccatcactggatgtatccgacatattccttgtctgatcactggccgaaagcttttcaaactcctcaacgatctgatcataaatctgataaatgtgttccatatagggatctgtcagtgcatcaaaaagtgcctctttcgtcggataatatttgtaaaatgcgccagtagtaagccctgcatcttttacaatatttcttaaagatgctcctgtcaaaccatctttcagaaaatgttttctggctgtatctaatatgtttttctgtgtatcttctgctttcgtcgacattcttttcgtatcctctaaagttcttttcaaaaatataacagtgctatatagcactgttatattttaacccattacaggaatttgtcaagtctactgtttagattttctttatcttttatctatctactcttttccattttgcaacagcatttcttacccgccagtcaatatccagacgtgctctgcgacattctttcggatattttcttgctgcctgaaatgccagtttcacaaagagtccggagccaaccgggagcattgtctttagcatgctctccggaaaaacgaaatgggttccatgctcataaatgacataatccaatctgcatgtgtgtgaatgttctttcatacgctgtttcattcggcggatatattttgcagtatcccacaacacatcatcttccgcaccaattaacaatactgttccatggattttttcaatcttgatcatctcatcttctgtgattggatgagccttttccgagtcatcaaacagttttcttgaattaatcatatcaccggtccgttttgtttctttctcaatcacatgccagtaatccggatgtttatagcaaaaaggcatatacggaaggggttctcctttgtaagaaaaaagagattctccatcaatcggccattccttacaaccatcttttttgccctgcataaatccctgccagataaagtcactcggtgtcaggccaatcgtcaatgtaatatctccaaaataagaagcggcagtcaatgcaagtgttcctgtagtagatgccccgacaattcctatcttctgattaccatgtacttttaaccaattgattgctttctctatacgttccagcggataattatggtgtccataatccttttttccaggcgacatcgtcatcacattcacaccgagtttatgtaaccatttcacggatgtacgcgccagataatcctccggatcatccccgatcatggcaatcattgcacagtctgatcctgttttgcatttccagtatgcaccataaaatccatctgtttccacatcaaaatgtcttttctttatttgtatcatctccttaatatcggccacgtttctccaaaactattattttgtttgagatattccgaacgatttgaatctttcctatcacacgataaatcggcataagctttttcattccttcaaccagactgacttcctgttgaacagaaaatcccggcacaattctttgcagttctgttccgttcttaactccccatgtgaattttgcattgcttccctctatggatttttctttcacatggttcacaacaaaaggtgacatggtttcgaccattacggttacttcctgaaatgatttttcaataataaaaaacatctttctgatatctttttcacacaaatacattgtaagcccttcgattattaccagaacattttcaccatgataatcgatatcatctatataggaatcatccattgcagactttgcaatctgatatatcggacctgtttctgtaagaaaccgtttccttatcttcatcgtttccggcaaatccacattgtaccaacgcagatattttccttccattcgataacatctggtatccagtccacatgcaatatttataacaattgtatttacatttttctccaaatattgctcaaccatccggtctaatacaattgttcttgcaatcacgccatagttcatggctttatctttatccgctttggaaaagtcatactcaagatttttcacaagttctactgcaatttcgtcgtttattttagcatttttctttcttgtttcttttgctcttgcatacagagtctgtaccatcgtttccggcacacctgttacatttactttttctttcattgttggtcgccttccactgatttttttacttcttctacccactctgcactatgacagcaaaacagttcttcatgctgcatgttgtatctccgaatatccggatttttgaaataagaacaatatctcttttcgtatttttttcccatctttgtagcgtaaaacacgtggatagttgttcccggcacatcaattccatgctggactttcgtaaccagatccgaatagaactgattataaatactctgttttgtaatccacggacttcctcctttaccgattccaaacatatttaaaaatccattatataattctttttttacctcgtctgttttgttcagttttttctgcataaatttcggaagaacacctgtatgtatcattttatacatgaaaggcactaccatggatgactggatttttgccacaagacgaccagcttcatccatatcactgctcccaatgatgccatgatctatatgaattctttttcgctgaatcaaaagggatacaaaacttcctccaagggagcacccatacgctgctttaattcttccatcatactttttcttgatttcctgctcaatcttttcgcattcatcttccattgaataaaattctgttttctcatttggatcaaatccatcataagaaactgttaccgtgtaaaaataagaatgtaatccatccagtatatgatcaaagctactatacaggcaacaggtaccaggaaataaaaatatcactggtttactactgtctccactttcataaaatttcatagctggtctcctttagttttttcatataagcataaaattgcttatgcagctccctcatttcatctggtgccttcctggcatgttgatacataaatttatctccaaagctactttcgaatgtaacagcaagcataatcgtcataattggcagtggtaaaaaacgaaaaatattcattttacaaggtgacagcctacctgcaccataaatcaatattctcatagaaatccgtcctctttttcatttttaaaaaaatgccagtgtttatgttagtaatatctaactctcattttctaaaaaaccgtgtgtaaacaaaactgtaattccacacggtttcttttcttatgcattcagtatatcacttttacctggttaatcaaccaaattttattttcatgatatttaaaatttcatgttcatgcgcattatattcactgcacttggaatgcaatttatcccctcatctggtcattaaaataataatttacatcctcttccgaagatatattctaacagtatgattgccatattgacaaacacaaataacacaattaaatgcaaagcagcatcacataacagtttaccaaactcatccttttacatcccagaagtgctgcaactctctctctgcttgcaagtaaacagatcaaaacctttgctcctttatgattcttaatattatggaacagcattgccgggccatcaattttagtcggtcgcataactgttccgcctgctcctacatgtcggtaaacacctaccaattctgctgttggatcaacttctatatttgtttctaccaactgtccttccatcttctttaaaagttctaatcaagttcttaaatcttttgcttcctgtagacttttcaattctttcaaatttattataaaaaaataaatgaatagaaaaattcaaattcacatagttattaattcacattgtgacttaatcgtaaaaaatactttgcatctcacaatagcacttcatcgaactaatcccattttttaagacttcatctaaagcttttttcatttcagaaattttttctatcattattattgtcctcctgcttccctgcccactctcatatttcctacaaatgccatggctggtatgcattctggattgcagaaatcgttgcttgcgtttacagctattgcatgtcacacaaattactaaaaacaatttcacaatcataagttaaagggcatgaatccattaatagattcacgccctcttattcctttaattttcctgtttgctctggttaatataatcaataatcgttttgcatatttcctcttttggttttccaagtgctactcccaattccatatacaataaattttctgccatttggaaatatcttgcatccgtggcagtacactttttgccttgagcaagtcttttctgtttcctctcatatatcatttttataatagcaaccaaggcttctggatcgtttgcttttattgccgctttataattttgctctctcattttttcattattcgtccaggctgtcggaatctctggaattcttttgatcaaattccatgctttttcttttgtcatacacaatctcaaccttgaatctgaatttgaaaccggaacatatattttttcttttttatcttcgattggtttcatcagataatacaatatattatttctttcgtcctgcggattcaaatataaaatatcctctattttacaaatacctgtaactggtttactgacaaagtccccaatttcatacttcacaaacttctctccttactaatcagcacctttattctgtaaaagtataacgtacaaaagagccttgattatctcctgttactattacaacatctccgctttcattatgtgtggattctaaaaccggaaatcttccatattcctttacataagcttccggactgtctgcttccgcctcaatcaaagtttttttactgtatttttctcctccacacggatttatttcttcaataaagatttcatattcatgcatgtatagttcctcctcagattcattttataaaagtgagtagcatatatgttgcttttccgcatcactacattgctcaccgttatttttattataaaactatttcgtttttatttcaaaagcggtttttactaaaaatgtatcttctgtttttagatattattaccatgcgtttgccaggttactccatctgctcaccggatttataagtgagattcggaatcaggtatccatttacattcgtgtactttaatttcattttattagtgctctccatttctcatcattttttgaccacaaatttacgacatttacgacaaatctgacactgcttttcaataccagacaaaatgaatgatgcccaagaaagcctgtaaaatagccactttcgggatagacaagacaggacaaaaatcgacttctattatcaatccggttgtgaagctgttgctttcgtgataagatatctgcatacattatttatgaggggggaaggttcatgaaaaaatgttcaagctgtggtgcgacttataatgacagcacaaatttttgcagttcctgcggcacacggctgactgctgtgtcagcacaaagatccagacatcccgggcataaaaagaagcagcacaggctcattggccggctggctgttcccgctgtcgttcttattcttgttttatccaccgtttttattttcttctatcgaaaggagtataagcctttgatcgttgatcataatccatctgtctatacctatgaagatctggtttcagatactgatctgttaaaatcccgttattcctctgttttctctgcggacagtctcggagaaactgcagatgggcggcagattctccattttattatcggaaatgaagatgcttccagaaaaatactggtcaacggcggtattcacgcccgggaatatatcacctgtcagcttgtcatgaagcagacagtctctttccttaaacatataaaaagcggagattcctacggagatatttcctataaagatctgcttcaggatacagcgatccatgtgatctgcatggtaaatccggatggtgtttccatcagtcaacagggactggacggtgttcagaccgatacagtccggaagaatctggaacagatctcacagatggatggggcttctctttcagataatgattatctcgaacaatggaaatccaatgcaaacggtgtggatctgaaccgaaactttgatgctttatgggacagttacgcggatcctgccggacacccatctgccgatcattacaaaggaacggcacccggatgtgaagcagaaagtaatgctcttattcagcttactctacaggaacacttttcccgtacgatcagctatcacacacagggagatgtcatttactggtattttggccaggaaggcagtctctacgaccagactctctcttttgccaacacgatcgctgctgcaacaggctatccactggacgctgattatcaggctctcgatcccgccgggtataaggactgggcgatcctgagtcaggggattcccagtctgaccatcgaagtcggcaccggagatacccctgtttcacctgatcagtttgaaactatctgggaggaaaatcagtttgtgtgggaggaaatgcttaaaacgttataattatacataaaagacagccatacaggagtaaatctttgtcttcctctgtatgactgtctttttcgattatttgcttacagatttgtatttctcagatccagctgtcatctccaccagtgatcgccaggctcaacagggcatccattttttctacttcttccacaccttctattttctcgatcagttctgcggtatcaagaacatcttccatggactcatccggaccgatttcatagtcaatcttggcttcgcagtccgggcatgggattcttttcatcgtctgcagggacaggaatcgattgccgcattttttacattcataaaatccgcactctttggtgccgtctggtacgtaatacattattttacactcctcttttctttctgagaataagcaaaaaagtcatccgcttttaactttatttcttatcaattttaccattcccacaaccggatagcaagtatcatgactgcctgctttattttcatcttgctattttcccctggaacagatacaataagtacagattttttccatcctgtgtctaggggtaaatcaatttttatacagggagaattttaattatgatacgttttaataatgattacaatcacggtgcccatcctgagattctggaggcgttgagtgctgtcaatgataatagttttggaggatacggtgaagatgaatggtgtaaaaaagcagccgacctgatccgagaaagagttcattgcccggatgcagccattcactttttcccgggtgctacgcaggcgaactttatcgtgatcgccagtgcgctttcttctgttcagagtgtgattgctgcagatacaggacatattaactgtcacgaggcagcttccgtggaaaatacaaaccacaagattcagacaattccaaatacagacggaaaaatcaccgccacacagattgacgcatgcgccggtgcttattatgaggaaaacgaaccggaatattatacagaacctaagatggtttatttgtcttttcctaccgaacagggcactttgtattcactggaagagttaaaagcaatccgtgaggtttgtgataaatatggaatgtatttgtttgtggacggcgcacgtcttggatatggacttggtgctgtggaaaatgatatcagcgttgaggattttgcagctcttacggatgttttttattttggcggaacaaaatgcggcactttgtttggtgaggctgtggttatcacttcgaatgatctgaaacgaagatttaaagcttttatgaagcaaaacggagcagttctggcaaagggatggcttctgggactgcagttttatacgttgctggagaatgatctttattttgaaatcacgaaaaaagcggatgtgctggctatgaaaatccgggatgcttttgcaaagaaagggattcctttctgggtagagagtcctacgaatcagcagtttgtgattttgaatgaaaagcagcaggaagtgcttggacagaattatacatttgaaaaaaccggaagtacaccggacggggttattgcgagattttgtacgagttgggctaccacagaggaagaagtggctcagttgatcggggatattgagaaattgtaacttgtctgttgttcgttcgaagaaggagcttcaagacggacgaaagggagtgcttgcccggtgggagcggacaaccgctggtaacgcaaatctgagctaatcgtcaactccgactatgttcacgagggtcggctgaccctcgtgaaagtctgcgtagacgctggatctcatctttgctaaaagcaccagcaaaaggctgtccgcccccaccgggcatgcactccctttctgggtgttggctgtaaacaaaacaaaaaatcttttctgggcgtcattatcatagaagattattatttacagccttttcttcatagtctcacaaaaagtcttttctgaacgtcttagtcgaggttaataaaccggtttctatcttttatttatttttatattttcgggcaatctcctgcatttgctcccatttctgttccatgtcccacaccagtttcagctgtgttctcgtacgatccagattgtgggtcggataatcaaccttaaagtatgtatccccggagagataatctgtcaggaatctcataccacactcataagtcattaccttcgccccgatcggcagacactcaatctccatatcggtcaacgcaccaccgcatccttctacgaaaccttttgcataaatatcatacagttccatatcacaggagatcttggaaagatctttctcatcctctgcgcctgtgcttgcaccaaagcggatggaatcaccaaaatcattcactgccagccccggcataacagtatccagatcgatcacacaaagaccttttccggtagtattatccatcagaacattgttggacttggtgtcattatgtgttacacgaagcggaagttctcctgcctctaacagatcacccagcacacaggcaacatcgtatcgatcctttataaaccgaatctcctgctgtactcctgcagctcttccgcatacatcttcttcgaccgctttctcaaatgcagcaaaccgtgccttggtatcatggaagccggcaatggtctccgtcagagtatccgccggaaaatctgccagcattctctggaaattaccgaaagccactgcactctgataaaagtcctgtggatcttttacttcttccagtgcatatgcatcttctacaaaatggtatgctctccagtactctccaaaactgtctataaaatacggttcacctgactttgcacatacaaaatcaagtgtctctctctgtggatctcctccctgtgccctgatctgttctttcagatagtctgtcacatggagaatattattcatcagcgaaaccggatccctgaatacggaccggttcatgtgctgcagtgaataccgatgtgtttcgccgtctctgtcaaatgacatcataaaagtatcgttaatatgaccatttccacaaggtgtacactccagaaatgttccatcaatatcaaatccccggattgcctcctgtcttcctgtctgtaggttctcccgattcatagttctatatcctttcatatctccggtatattcgattggtattacctttccaaagccaaatttccataccggtatttctaatttgttttttcatacggatgccggtcatatcgtaatctcagtctgttttctactccgtatcatatgtgtcataatattcagtataccatattgtcagaaaaactcaacttaaaattctgtatttctatatctgtattgtagaatcggtatcgatacaaaatcaaaaccccttaatttctataaccgcctcatctgtatccaaagcttttacttcttctaccgtcagtcctacaaattctgctatctctacatatgataacttatgagattttaacatacgtctggctaccgctattcgttccgcatctctgccttcttctctgccttcctcccggtcaaactctctttgcctctcttcgtcgtactcataaagacacatcttcacaaccgttactgaaaacttataaaaagttataaacttttatgtttcattcctgcttcaacgagtatgcttttgatgatataaatatcaatctactcacaagtccttgtactctccacaggcgtaaattccggactagcgtatccgtacatatttgcattaacgtttcagtgtcagcttgcaaatctttctccataagccttgaggtttatagatgcctggaaatctctgtcaatcctattcccgcacgcacatctataaattctgtcagataacttcagatctttttttatgtttccacaacagctgcaaagctttgatgatggataaaaccgatcagccactataagctggattcctttatcactgcacttatattcaagctgttttctaaacatgaaaaatccctgttcctgaactgctttggataaatgcctgtttttcatcattccgctgacattcagatcttcaatacatataaatcttggttttcgatttacgatctcagatatggtctgattcaaatagtttttacggatgtttgttaatctgtgatctcgttttaataaaagtttttcctttttgattacattatttgttttacagtaactttctcctctcttatttttctcgtaagaacgagagatactacgctgtaatctgcgtttctgtttttctagtttctttactttctgactcttattgatgttcttatattttacagcatcagagcagacagccagatctttgattcctaagtctatgccaaccccatcatcattaagcgtttccctgcaatcaggaaattccacacatacactgatccaccagttcaatccgtcaaaagatattctcggattcatatatttagcatctgtaggaatgcgtccatgttctgcaagtcttacccaattcattttttgtttatttgctttcctgccggaggaaaagccttcaaatttaacgtgggtattactgaatcgtatcttaacattgtcctgatagaacttcggcacggatctctttctggacttgaatcttgggaatttttgcaaacccttgaaaaagttcttatacgcagtacaggcatctttgattgcctgtttggttacattatttgaaatactcagtaaccatgcatattcatcagaatgtctaagctttgtaaattcttttctgagttctgcatctgaaacgaatctgccacctttttcataattttctttttccctggccaaagcccagttataagcaaatcttgaagcacctgcgtactgaaacatcttagttttctgtacattgtttggtatcagcattacttttatggcttttatcatctgtttcctcctgtatcagttccctgataagtttcctggctttattcgctcgttttccttgtaatttacagctgaatactgtgattatttgaaccagttcttcaataaattcctgctgttcggatttttcagtatgatcaataatctcaatctcacaattataaagtgaagcgatatattctatcaactcaaagccaaatctcaatagcctgtctttatataagacaacaacctttttcacctgattttgagatatccgtctgagcagctcctgaagtccttttttcttataattaatcccggaaccgatatcacttattatctcaaatggctgtcctttttccagaagatatatcttaacattatcaatctgtcgttccaaatcatctttttgtttatggctggaaacacgacaatatccaattgtaatgcggtttttaggctttacattgattacctggttgagttgctcatcagaataatatctatagccacttgctgtagtatgatgcggatgaagttttccattggcatcccaatttcgtaatgtctgggcagatacgcctatgatttttgaaaattcatgtatagaataatatttactcaaagaatcatctcctttcaataatattccactctaatatcttataaaactcaacatgtgcttatataattttataatctatatttaactgttaatactctctcgttcttttaataaccagttgcttcctcatttttcacaattttaacaattcggctggttcccagacggtctgctcccagtgccaggaatttttctgcatcgtcgatagaagaaattccacctgctgctttcatctttacattcggtccgatatgttttgcaaacagttcaatatctgcaaaagtagcacccgctccgccaaaaccggtggatgttttgatataatctgctcctgcgctggtaacgatctcgcacattttgattttttcttcagccgtaaggaaacaggtttcgatgatcactttcaggattttatctccacatgctgcttttaagattttgatttcattttcaatcaagtcatattttttgtcttttaaccatccgatattgataaccatatcgatctcagaagcgccgtttgccagggcatctttggtctcgaattcttttgctgcagttgtcatgtaaccattcggaaaaccgataacggtacataccgggattcttccgttcatgtattcggctgcctcttttacatagcttggcgcaatacatacagatgcagtctcatatttcatggcatcgtcacagatctgtttgatttcttcccatgtggatccctgaagaagcagtgtatggtctacgtgttttaatatttcattgatatccattttttatctccatttcttatatcattatttttctgcctggtctgctttgatcagattacggatggcttccactgccacctggatcgccatatcggtatcatgtaccaccggattctccaggcccaggctctctctctcctgattggcaactaccaggaagcaggaaccggctcttactcttaattttcctgcaacgatgaaaagtgctgcggattccatctcagaggcaagacaacccatcattttccatgcgttccatttgttgatcagctcatatcctaccggcattttttccggttcatgctgtccgtaaaacgcgtccttacactgtaccacaccggtatgataggtataatcttttgcttttgcagctgcaaccagtgcgttggttacatccagatctgctaccgccggatattcgatcggcgcatattctttggatgttccttccatacgaatggctcctgttgcaataaccacatcaccactctttacttctgtctgcatacctccgcaggttccgattcttaaaaatgtgtctgctccgcagcgatacagttcttccatggcgatggatgcggagggtccaccgatacctgtggaagtaacacttacctttactccgtccagtgttccggtataagtaacatactctctgttatctgcaatcagcaccggatcgtcaaaatattttgcgattttcgcacaacgtttcggatcaccgggcatcagcacgtaacgtcccacttctccttttgccacctggatatgatactgtctgcttgggtcttctgaataatttttcacgatatttccacctttctttatctctgtcccttatcatacggaataccttccgccttcggtgctctggagttcttagatacaaatacgagcgccagcagagagatgatatatatgaacatattatacaatgttaatgtccttctcgggtttctccatttttgaacttataaatataatatgacacatgtacacaatcgtccagacaacttaccttcttttttatctattctttgtattttgtctgattttgctaattattcttttcttttttatatatttttcctatatcttacttttcggaatccattcttttatta

SEQ ID NO: 645 - DNA, 880844 bp, Oliverpabstia intestinalis
  source 1..880844: mol_type = genomic DNA
ttcaaaaggttctggatattggttgatagcgtctatcaaatcatcctctataaaatactcctcttccggttttattgcagctttcaattctgtaatgatttcttcttttgtcatagatttcatcgttcttcctccctgaaattccgctgccagatcatcacataatctttttcaccggtaagtttgtccaaaccttcgcattggatttggaagccttctcttcgataaaaattaatagcccgtacattcttttgatacgcatttaaaagtaatttttcttttttacttttcacataatccagcagcatttttccgatcccatgcgactgcatctcatcagaaacaaaaatgccttctatatactcgccgtttaatcctgtaaatccctgtatgttccggtcgttctcatatacatagacttccgcctgtgacagcatttctttcactaatccaaaattacttttccagtattgcgccggaataaaatgatgtgctttcagattgctgtctaaccatatctcagcaactctgtctatatccgcttcctgtaacactctaatcataaacattgttctccttaaaaagccccatacctgctgtctttgtcacgcagatatgcaatcccctattatcgcgggcaggtcacgctttcatcatctttctgataatcaaatttcctgtcatttttttcttccagggcttttatgatatggtatgtgtattcgttatatggtgttgggattcccagttctttgcccatacggatcagcgcacctgagaacatatcgatttctgtgtgacgtcctgcatccagatcctgaagggtagaatatcttgcagatggcggaacggcacttccgtgactggatgaatcatctgccttacggatgtcgattccttttgctgctgcaatcgcttccagttcccccggagtttgttactgatttctttcatatgcatactgtcccgatagcagcctacacctgcgccgagaaccgcctgtggaaggttgttaccgacattcagacggaatttgcaccacatttcttctttgatatattctgtggcgcggtaatgcagcccggtatctgcaaaaagatcctcgatcgcctgtacacgttcgctctgatacggtgctgtcagttcaccgaaaataattccgatcgtcgtttccgggttgaaacagtagccgtttccttctttatgagaagccaccttgatcagcgcgtgcagaatatgagtagccccgatctcttttgcaataatctcttcactgtctacgccgttcataagactcataacagtggtatgttctccggtgatcgtgcggatgctctccaatgcacccggtaatgccccgtattttaaagccacaagtaacagatctgtcccttttgcttcctgcggggtccatacttccggatgataggtgatgccgttaatgatgcatccttttttcattctttctgcgcgttccccttctgcgatcacgcccaaccggatatctttccggtttgagagtccccatatcacatacgatccaactgctcctgcgccaagaactgcaactgtttttatcttcatgtttttctctccttccacaaaaacaacttattgggcagaatactatctgttgcatatttgcttttattcttttagcgagataaaatatgcttcacaaattttactcgttgcattgtatatcaataattgatccggtggatcaattttgattatcgcgctagagcttgtctgaaaaaggcttttcgtgagctgcgagtcccagtttgtgggagattttatccgaatgagggcggcgtagcgggctacggcaaccgaatgagggtaaaatataccgcaaagtggggcttgcagattgcgaaaatgatttttcagacacgctctagtcaccaaggtctcatacaagcatggactttggctcgttgcccgcataaattactgtaaatatatcatatttgccgaaagattgtcactgcccagcctgacagtgcaaaatgcaaatccctctctgtcccttccgttgcttttttcttttggttgtattacaatcataagtaacaattgtcagattatcaaaggagcagccaccgttatggataaaaaaagtgtgacaactctcacgttaaaacaaatcaacaaacataccgtctatcagtacatctaccgccagcgggaaacttccaaatttcagatcgtgcaggatctgaacatggggctttccacagtcagtcaaaacctgaccacactggagaaagaaggactgatcgaacgaaacggatattttgcctccaccggagggcggaaagcgcagattatccggatcgtaccggatctgaaaattgccatcggaatcgggattttaaagaacatgtttcatctcgttgcggtggatctgtacggggaggccgtcgcgagggagacgattccacttgcctacgaggacacgccggaatattacgacacatttgccggcgaagtgcttcattttattgaaaaaaatgagtaccccacggaaaaaatctcagggatctccattgccacacaggggatcatttccccggatggttcgtccgtgacttacggtgctattatgggaaatacgcggatgcagctttctgattttgcttcccggcttccttttccgtgtcatctggttcacgactccaaggcggccgcggatctagaactctggaatcatccgaaactggacagcgctcttgtcttcttattaaatcgaaatctcggcggtgcagtaatcaccaatcacagcgttcatcagggtttttccatgcacagcggttctctggaacacatctgtgtggaaccggatggtccagtctgttactgcgggaatcgcggctgcctggaaaccttctgttccgccagtgcactggaactgcgcagcggacttccggtaaaagaatttttcccgaaactgcatgatccgaatacctctgaggcgcgcttacagggcatctggcaggactatctgcggcatctggctttcgccatccgtaatctcaacctgctgatcgactgtccggtgatcctgagcggatatcttgcaccttattttctcccggaggatctgaatcggctgcttgctctgatcaatgagcatacaccgtttcctctggcgaaagattcgcttcttaccggcacccacggacagtatacaccggcaattggggcggcactgttttacgtgaaaaattttctggatacataggcatagccatggtactttctccttacgctgctttattcttatgtaaaccaacagggagatgataattcaatgttaccggccacggaatgaatagcaacaatttcatatattttcctgtattctcttgcaccctctttccatgagtgctataatcctttcaaacagcagagaaaccctatgtgtctgctgtttcgattgaaatactatgcaaaataggtttccatgcgtcaagtgttttgtggatggggagttgccacagaaacgaaaagtcggttcgcctgcggaccggacttacgatatggttaccgcacccgttgcaacaaccagatgattaacatccgattgtgaagggatatactcatagttatttttcagtagctttattttcttcacatcagggtgtttttttcttacatattattctgtacatctatgcagaacatcctgatgcatatttttgtatgctcaaaatctttctatgtctgattttacaggaagtttctcagtatacagcattatttacacaggaggttttgtaccatgatggaccacgaaaaaatcaaagaaggcgttcgtctgatgctggaaggtatcggcgaagacgtcaatcgagaaggtttactcgaaacacccgaccgtatcgccagaatgtgcgagcagatctacggcgggctctatgaagatgccggtgtgcatctgtccaaacaatttcacgctaccaataacaatatcgttctggaaaaagatatcaccttttattccacctgcgaacatcatctgctaccattctatggaaaagctcatgtggcttatatcccggatcagcgcgtggcaggtttaagcaaactggcccgcacggtagaagtctatgcaagacgcccgcagatccaggaaaatatgaccgcacagattgcggacgctctcgaagaacatctgcagccgaagggtgtgatggtcatgatcgaggcagaacatatgtgtatgaccatgcgcggtgttcagaaaccgggcagcaaaactgtaaccaccatcgtgcgtggagcctttgcggaagatttttccctgcagcagacctttttacagatggtaaaggcttaaatctgtcatggaacagcgagttattatgaaacgcatcgatcagattttatcccaccctgtctttcgagagcagtttgcactgttacaggaagcagaaaaagaccggatcttctgccgtcacacgatggagcattttctggatgtggcgcggctgatgtatatttataatctggaagatcaggctggcttttccaaggaaatgctctacgccgccggacttcttcacgatatcggccgttatgaacagatggaaaaaggtactcctcaccatctggcaggggcaagactggcggaacgcatccttacggactgtgatttttctcttactgagcagaaatcgattcttgctgcgatccgaagccaccgggtaaaagatactgcggaaactcccttattttcccgctatctctaccgtgcggacaaacagtcacgaaactgtttgtactgtcctgcaagaaatgcatgcaactggccggaggagaagatgaatctgacgatttgttattaattttgaacttatgtaaacttcaagaggagaaaacatgtatgagaattggtaatcgtgaatttgatacaaagaatgaaacttatattatgggaatcctgaacgtgactcccgactctttttccgacggtggaaaattcaatcatatggatgctgctctcgctcacgccgagcagatgatccgggacggcgctgacatcatcgatatcggcggggaatccacccgtccgggacataccgtgatctctgacgaggaagaaatcgcaagagtaacgccggtcatcgaggcggtcaaatcacattttgatgttccggtttccatcgacacttacaaaggaaatgtcgcagaggccgctcttcaggccggtgcggatctggtcaatgatatctggggattcaagttcgactataaaaccgccgaggtgaccgcccgttaccacgctgcctgctgcctgatgcacaaccgaaacgaagccatatatcagaattttctggaagacatggtcgccgatatgaaagaatgcgtcgctatcgcacacaaagcaggtgttccggacgataaaatcatgctggatccgggtgttggctttgggaaaacgtatgagcagaatctggaagccatcaatcatgtagatgtcttgcaggaactcggactcccgattcttctcggcacttccagaaaatctgtcatcggcaacaccctggatctgccggtagatcagcgcgtggaaggaacacttgccaccaccgtgatcggcatgctccgcggatgctcctttgtccgggtacacgatatcaaagaaaaccaccggatcattcagatgacaaaagcgatcctgtcctgctaggaggaaatttatggataaaataagaattgagaatctggaaatctttgcaaatcatggagtatttccggaagagaattttttaggacaaaagtttgtactctccgccgttttgcataccgacaccagaaaagccgggctcaccgatgagctttcttattcggtacattacggtgaagtcagccatctgatcaaaaaagtagtcgaagaaaatacctggaaactgctggagacggtggcggaggcgaccgcaaaagcgattctgctctcctacccgatggtctctcaggtggatcttaccatcaaaaaaccgtgggcgcccatcggtctgcctctggataccgtatcggtggagatcagccgcggctggcataccgcttatatcgcgctcggctccaatatgggggacaaggaaaaatacctgaacgaggcagttgaaaaactgcagcatacttcggactgccaggtgctgaaagtgtctgattttctggtgaccgcaccctacggcggtgtggagcaggatgactttttaaacggtgcactggcactgaaaacactgctgacaccgcaggaattgctcgaacgcctccatgagatcgaacaggaagcgcaccgggagcggttgatccactggggaccgcggacgctggatctggatatcttactgtatgacgatctggtactggacaccccggatctgatcattcctcatgtggagatgcatctgcgggacttcgtcctgatcccgctggcacagattgctccgtggaaacgccacccggtactgggacttaccgtttcacagatgctggcagatctgcaggcgaagcaggaatcctgatctgctatacggattcctcattctggtaattatgtaaaccattctgctatttctgaccgtcagactcctccttcgtctgctcatttgacaaatcccccggattgccctgtggcagatctccctgcgggcgttcccccttttacatatccggcggggtttcctgtccctgcggcagggtcggacggtcggaattgtcggaattgtcagaatcgccattattctctcccattggaccactccgcggcttctgtccgccaccctttccctgtgcattcgtcacttctccatcggtgtataccataccttccatggttacttcccggctgttctccccggtgtggatcgtataggtgcttccatcgcttaattctgcgcagctgatgaccacggaattatattccctcaccggtgtgtaacttaccagcgtattgccatcttcatcttccagtgcgatctccccgctctggttatccgccaggtccctgcatttcgttctttttggttgctttcgtattgcctcccccagctgtgtggtacgccagagaatgttccggtcaaaagtaatccgaagttcgtgattctcccttccgtaaaatgcctcccgttcataggagagatacaccaccggtcagactctccgtttgtagaccacttttttgtacttctttttcagttcgataaatgcttcgctgtcatcctgtgcccgtccgtaggtatgaagccgaatctgtccggtctcatatagggtttcatataagccagcagatcttttttctgatcttccgtaagcaggtatttgtattcataacgtttgaaaattgtctgattcatcatctcggttcctccttatgaaggtgattgtatcggagaaaccttaattgaagtttaaagaaacataaaaaacacaaaatctacacatttattccgaacaaagaatatcctttctcatcctcgcgaattttactcgttactcgcgtaaataaaaaaacagaacctgcataaagtccttacgcaaggttctgctttctatatacctttatataaatgatgttggggtcaaacggtattttgacccctttgataccagattgctacgtgctttgcactctcgcaatcctcatataaatagtatcattttttcccttctacacagatccagtccgtaccctcttttacgtggatctgaatgcccgtgaaacctgctttttcaaacagtttcctgaattcttcagcggtcggggtaaataggtgaaaacggcaaatattttctagtgtcttcggatccagaccctctttgttatacgtatccgccaccaacaggaacgtaccaccctctttcagtacccgccgtacttctttcaggttttcctgtggatccggccagaaataaaagctttctaccgtaatgatcttgtcaaatccatcgtctgcaaaaggcagcgcttccacggagccttccagaactttcatctttccgctttccacatcctgtcgattcgttttcagcgaggttttcacagacaccggtgaataatctatgcccgtcagatggcctgtcgttatcttctcacccatccgttttaacgtagcaccaccaccgcagccaatgtccagaagctcctcttccggtgcaatctgccagtgctccagcgcccaacatgtcaccggtgaatgactctcattcattcgtttcagcattgttgctccatcctcaccctgtggttttgccggatttccggaaatggtgatttcttcctgcgttcgttctgttttctttgctgtatgaatattacacatattgcttcttcccattatacttatctcctttacagtcatttccacataatactgctttttcatttccgtcattcatcactaactctagtatgttactgttcactccattctcagtaacactagtataacccaccccacaactcactgcaagttcacgttgtattttcctttcaagtcatgtatactcattttaaacaacagattttatcccctggtgaagtaataaggtatgttttcgtccgtgtatcagaagatagtcatgtacctaatataccgtctttttccagatacttttacagattcagaaaggatttttatgattcaggatattaccccacatcatctttataatgaatttactccgagatctccgcagaacggagatctgatttttgctttccgtgaccgaaaacttttggcagatctctcagcaaatacctgccggtttccactatgggaaaatgtttcttcacagtttcccaccactacttctctgatctggctgtttgctctggatcaaacctcctgttttcttgtgatggatgcggatctggactttccggaaacttatactttccactctcttcaggaaatccgcggtcgagagcccaagcatcatatttttgctgcaatgacggcttttcatctgtatgactggtatcggaacaatcatttttgcggacgttgcggaactcctgttgttccggatccttcccataaagaacggatgctctcctgcccacaatgtggaaataccatttatccgaaaatctgtccggctattattgtcggagtgatcgacggggaaagaattctgctgacaaaatatgccggacggaataatcctaattatgcgctgattgccggttttactgaaatcggggagaccgccgaggaaacagtaatgcgggaggtttatgaagaagtaggagtaagagtgaaaaatctgcggtattacaaaacccaaccctggggaatggcgtcggatctcctgatcggctattacgcagagttggacggtgatccctccatcactcttgaccgcaacgaactttccaccggactctggatggacaggaaagatatcatcattgaagacgaagacttcagtctgacacgtgaaatgatcgtacgttttgcaaagaccggtcgtgctgtactgaattaatatcgtgctgtatttacatatttcgtaactgttcagtagcctcacagttacgagtcgaaatgtatttctaatcaccttcggtgatggcactttgacttgtatgtctcgggattttggcaataaacatgccaaaacgcctcgcggaatgctacctactgagtagttgccacatttctataaaaaggagaactcagaatatgtcatcattaacactttcaaaagaggaagaaaaaagactgaaagggcttggttttttgaataataaggggacagataatttttctgcccgtattttaacagtaaatggaaaagttaccgctgcccagcaccgggcaatggcagacgcggcagaaacgtttggaaacggaattctgacttttactacgagacagacagttgaagtacagggtattccttatgaaaaactggaagagtttcaggagtttgtcgagaatgccggtatggctatcggtggtacgggcgctaaagttcgtcccgtagtttcctgtaaaggaaccacctgtcagtatggacttcttgattcgtttgcgatttcagaggagattcataaacgtttttatgaggggtatcatgatgtgaagctgcctcataagtttaaaattgcagtaggcggttgtccaaataactgtgtaaaaccgaatctgaatgatctgggtattattgggcaacgaattcctcattttaaagcagagctttgtaaaggatgtaaaaaatgtagtgttgaggcagtttgcccgatgggagctgccaaagtatcggataagaaattacatattgatgaaaatgtctgtattcactgtggtcgatgtgtgggaaactgcagattcgattcgattacagacggaacgtatgggtttaaaatttttgttggcggacgctgggggaagaagatttctcatggtcgtgcactgagtaaggtgtttactactaaggatgaggcaatggatgtgattgagaaggcgattttactgttccgtgagaggggactcgcaggagaaaggtttgcggttatgattgatcggattgggtttgaaacggttgaggaagcgcttttgagggatgattcgttattggaacggaaagaagaaatcctgtcccgggaattataaaatgctattgtcgctacataaatgatttcgctgcacagataaaccggatcgatgagtgcaaaagacagttcagctgcatttagaatgcattgctgagctgtcttttatttctcttatggtatgtctttcgtggtttctctttctattttctttttatcttctatatcccttctggtgttatgccgttttttcagctgcctgtccgtaagtcttttttctcacaaagtaatagcagaccacctgcatgatgatagtaatgatccaggaacccggataggaaataaagaggatgtagagacttctgtgggatgggaatattccaaagatccacagaattcttgtgcctacagttcctatgacggacaggatcatggggacggtggatgatcccatgcccctcagggctcccggaaaaagatccatgattccgcagaggaagtaggggacggtggtaatagacaggatctcaaggcctgctttgataacttcgggatcctctgtgtagatggagaggatcggggagccgccgaaataggcgccacagccgagaacacctcctacgatcaccgaaagaatcaggcaatcgatcagaactttgtccattcgtttgtattttcccacaccgtagttctgactggtaaaactcatgcatgcctgtgttacggcattgatggatacgtagaggaatccgaggatattgttggctgccgtgtaccctgccatagctaccgaaccgaaggaattgaccgaggactgcagcagggcattggagaagttaataaccgtactctgaatacccgccggaacacctacctgaaagatctgcatcagataagcttttttcatggtcagttttgagaaacgcagctgatagcttccctctgactggtacagacaccgcagtaccagaatacatgaaatcagctgggaaatgaccgttgcaatggcaacaccttccaccgccatatgaaagaaaatgaccaggatcatatttaacacagcattgatcacacccgaaataatcagatagaataacgggcgcttcgtatctcctaccgcccgcaaaatggctgcaccatagttatacagcatgaaaaatggcatccccagaaaatagatctgcatatataatgttgcctgggcaatcacatcctccggcgttcccatcacttccagagaccagcgggaaaagatcagtccgatcactgccattgccacaccgctgatcagtgccagtgcaatagacgtatgaaccgtttctgacatttcttttgtttttcctgctccgtagaacctggccgccagtacattggttcccagagaaattccgataaacaggttggtaaaaacattgataagtgctgttgtagatcctacggccgccagtgactggctgccgctgaaccttcccactaccacgatatccacagcattgaacatcagctgcagaataccggaaagcatcagcggcaatgcaaaagatatcagtttatccataatcgacccgttgcacatatcgatctcatatttattatttttcatagtgtgttctcccttacctacgccagatgatttgtttcttttctttatattctgaactattttccctataaaatcaacatctctttcttttataattatgcaaaataaccactgactttttgcaaattcgacatttttgaattaaatacatcaatccattgaaatcgctgttttttttcagtataatgactaatggtgatagtgattatacacctattgataaggaggaatatattatggcaacatggaaaaatctggacaccctctcatcttatgataagctttccggactgaaaaatcatgtggatattgccactgcaatgtccggagaacagggtggcgaacgtgtaaagaactacagcactccaatggctgcaggtttacagtacaattacgcagcaaaagaagtagatgaaactgtcctgacagctctggctgaactggcagacgaagcacagttaattgataaatttgaggagctgtacaacggcgctgtaatcaacaccggcgaaaaacgtatggttctgcatcacctggcacgtacacagctgggtaatcctgtcgttgttgacggcgttgacaaacgtgaattctatgtggcacagcagaaaaaagctgctgattttgctaataaagtacatgccggtgaaatcgtaaacgaagccggcgagaaattcacaaccgttgtacagatcggtatcggcggaagtgacctgggtccccgcgctttatatatcgctctggaaaactgggcaaaagccaacaataccttcaaaatggaagcaaaattcatcagcaatgtagatccggatgatgcagctgctgttctggcatctgtagatctggcacacgcactgtttatcgtagtatccaaatcgggtacaactctggagaccctgaccaatgaagcattcgtaaaagatgcgctgacaaaagcaggtctgaatccttccaagcacatgctggcagttaccagtgagacttctccactggctaagagtgatgaatatctgactgcgatcttcatggatgactatatcggaggacgttactcttccgtatccggtgtaggtggagcgatcctttctctggctttcggaccggaagttttcgcagaacttctggatggtgcagcagccgaagacaaactggctaccaaccgtgatctgttgaaaaatccggatatgctggatgctctgatcggcgtatatgaaagaaatgtacagggatatccttccacagcagttcttccatactctcaggcactgagccgtttcccggcacacctgcagcagtgtgatatggaatccaacggaaaatctgtcaaccgtttcggtgaaccggtagattatgtaaccggaccggtcatcttcggagaaccgggaaccaacggacagcactctttctaccagttactgcatcagggaactgacatcgttccactgcagttcatcggcttcaaaaacagccagctgggtgtagatgtggatatcgaaagcagcaccagccagcagaagctgtgtgcaaacgtagctgcccagatcgtggcatttgcctgcggtaaagaagacgaaaatctgaacaaaaatttcaaaggaaaacgtccttccagcatcattgtaggagacaaactgacaccggcatctttaggtgccctgttagctcactttgaaaacaaaatcatgttccagggctttgtatggaatctgaacagctttgaccaggaaggcgtacagcttggtaagattcttgcaaaacgtgttctggctcatgataccgacggtgcactgaaagtcttcagtgatatgctgaatatctaagcaaaactgtttgtgcaacgatatcagatttccttgtattcatggattcctgaacgtttcctctgtaaaaagaagccatatcatctttcacaggatgatatggcttcttttatctctttacacattttctgtggcagttttctttttatagagatcataatattttgaggttctctgccgatataacatcagacagccacgaacacaaagttccaccgccatagcgatccacataccgtgaagccccagactttttacaagaatcattgccagacccagccggacgatccagatacttccaagattcataaggcttggaacaaaagtatcacctgcgccacgaagtgctcctgctgccacgatagatgctccaaacaatggttccgccagaagttcgatacgaagtacctgtgccgccagcgtccgtacggatggatccggtgtcaatacccggaatacaatcggacagatcagcatcatgatcgctccggttgcagccatgaagcatgcacccatcgctgtacagatattcccatacctttttgcctgtttcgcctcacctgcacccacgcttctcccaaccagtgttgttgccgccgacccaataccatatcccggcatatagcacagactctccgctgtcactgcaaaagaatttgccgcaatagaaacagcgcccaatggggcgatgatcattgtagctgccaccatcgcactgtttatggctatttcctgcactgccaccggcgttccgatccggaatgctctctttaatatctctggatcatagtgaaacccttccgttctcctgagatgcagtttttcattgtgaacacagcaccgcgccgtcatggtcaggctgacgcatgcacaggcaagcgctgttcccatcccggcacccataactccaaatcttggtatcagaagtgcattgaaaatcacatccaacacacacatgattgcattcaggatacttggtgtcaccatatctccgctgcactgcaggaaagacgaattcagggaattgatctgtgaaaacggtaccatcagcgcatagaccataaaatacgccgatgcatctttccggatctccggattaccgcccagccacaccggcagtcttccgctgatggaaagtccgatcagacacaaaattcctgataccagaagtgcaaccagcagaccatggcataccacctgtctggcttctttctcttttttccctccaatatgatgtgcgacctgtacggaaaatcccgctgctatcgcataagtaattccgccaaacaaccaggtagttgttgctaccagaccgatcgcagcagaagcattcgctcccagtgctcctaccatcgcagaatctatatattgcatggctattgttgtaatttgtgtcagaatagctggcaggctcaaatgccatacttctccaatctgctgccacaattcctgactgcgttgttctctcatttttctccctcttatcttcccgttttttcccaaacattgccctggtccgaatcatctaatttagttccatgggcattttatctatattttttttaattttttctcatttttgttatactttcacaattgattatactatctcccagagattttcacaatggatatactgcaagtttctgcttcatatacaggataactgttttctgcaaatatttatgtctcccggtgctattttttctctaccatcaatacccgatcttttactgtaatacctggtatctgaggcagggcggtatctgtatgataggaccggtaaagatccgcaagtctcaccgcttcctgtgccgatgaatcggtacgattttcatacaacccggtaagaaaatctcccagtgagatcccctgctcttccacggcctgcgacagttccgaaagactgtctgttgtgaaaatacagagactgtttccgaggctgctctccgactccattcccgtaagtacttctcttaatctctccctgttttcccggagagaggtaccaaaaattactgcttttacatgtccgatatccagatactgttccctggtcgcttcgtaagcagtatggatctgcgccccatccgaaccggtaaaatacagttcatttcccggctgcgtctctgcgctttgtttcctctgcccggtgtcttcgacaagagatgccatatgcatccacactgtatacctttgttcttctttctgccagtcgatgccgatcacctgcggatacgcccgtttttccggttccaccgcctgacaggcaataagaaaaacaaatccggatacaagcaggcaaaacagaagtttcactccattccggatgctctgcctttctttatctttttccataagattttctcctcgcccatgctgcacagaccgtcatcatcaaacatacgggcagatagacccggcttaacatcttcgggtactgacgactccagttccactgctcctgtgctgttgttcccagtaaaaaacaaagaatcgctgacggaagacggccaatagaaatatgaatcctgtccgccacataactgctgtaaaagaagatactgcccagcaaaaaggccagcgaaaacaatagtatgcttaaaaaaatcaaatctacccgtcttaaaaagccaccggggagctccacgcccgccatcacttccagaatcgggcaggtattcatagttgttgcatctgttccaaaattgacagtgagaagcaccgctcccgtcagaaaccagagggacaactgaccaatggccggcgcaagtccttcttttcttcttttttctttgcggtcacgaacctgtaccgtcagccaggtcatcagaccgatgccagatccgtatgccacatattttccgatgcttttcacactccgtttccagtcaaaccctgttgtttccagatgttgatcgccccacaccatctccagagaaggactgttttgaactgcagccagcaacagcaagatccctcccagccatgctgcaaccgcccatgagatttgcgccagccgcccccgtgcctgtacatgatgggatcctcccagtgccgcaagaacaaaaataagggaaagtaatgtctccggcactccggaaaccagatattctcctgccagatgcccgactttttccaccagccatccaccggtaagcaccagatagctctcccagattccagctatcagccaggcgggaacttttcccagataccggatcggatcccggaatactgtcatctgccttcgaaggatcccgctccacaggatgagaagtatgccaccgatcaagattccgactgctccttctcttccggtaaattccggaattccccataccaatcccacgcccagtgccgcaagcaagcactgacagtgcatctgcaaccatgagattctattattctctgcaaacattgcctccgtcactcctcatttttctatttttctcttaagcgaactctctgggatcttcgcgtatagatcggacgataccgcattttcctcatcggtgcccgcaccagaagatcccgttcgtcctgatatccggcaatatcttttccgataaatggcatcagatatggaatcttaaaactggtcagccgggccagatgtcccagaagcagatacagacccagtacgattccatacatgcccaacaatcctccaagcagaataaaaccatatttgatcagccggaatgccgaagtacattcttcattcggtatagcaaaagaactcaatgcacttaacgccacgatcaccaccgccatcggactcaccagattggcactcaccgccgcatcaccgatgatcagccctcctacaataccaatcgttccacttaaagctccaggcatccgaatccccgcctcacggatcagttcaaatgccagttccataaacaatacttccagaagacttggaaatggaaccccctgccgggactctgcaaaggacaggatcagattggtcggcaggatcatcgtatggaacccaatcactgccagatatgttccggataacaaaaaagaaaagagcatcgccgcatatcggatcacccgttcaaaagaagcaatctcaaaccggttataacgatcctccgtcacattcataaaatcctgaaatacactggggagcaacaatgctaccggtgaattgtcacacaacagaacaactcttccatccagtacttccatcgcagcaagatccggtcgttcggtagtctgaaactgtggaaacggtgacacccagtcctcctctgtcagctgctcaatgattccactgtcaagaaccccatcaattacaaattgatcaatgccccgccggatctgttccagtacttccggatataccagctctttcatatataccagtaccagccttgtatttgaccggacacctgcggtcagctcttctactttcatatctgtactccggattctttttcggatcagtgctgtattggtttttaccgactcggtaaatccttcgtttgatcccctcagcaccttttctgtatctgtattatctacagagcgtgcgggatatcccttacttccgattttcagccctttatcatatccctctaccagaagaagcagattccctgccagcattgcattcatcccttcttcccgggtctgcagtggctgtgcttccgaaagccccaggctgtttgcttccactgcctgatacacttctttcggatctttccccgccatgtcgataaacatccgtccaagcaccgattcttccaggatcagattcggtacggtattttccacatagatggcaagcgcagagacgctgccgtctttcccgagtctcatgggctggagtttaatatccgaacacccttcgcagcggcttcgaaaccagacctcgttttcttccagattttttgttaccggtgttccatctgtcatccttttccttcctttctttcactctccttattcttcccggtttttccggttctatacccggaaaacccgaacatgtaaaataagcaaaaaaagcagaaaaacaggaagtctctaatgatcttcccatctttctgcttctctgtttccttattttacttttcctgttcttctttattcatctgctccaggcttcgcagaatcgcattctgctgattgacaatatgaatgcagatatcttttactgcctgctgctgatttctggctttgagtgccctgtatacagcatagtgttcttccaccagggtcttacggctctccacatctttcagatattccacacgatagcgatacatctgttcccggatattgctgatgatctgtaccagtcgcttgttatgggtacttccatagatcacttcatgtacctttacatccgctgccgcaagcactcccagatcgtcttctttcattgcttcctcgaattccttcacagcccgctccagttcttccagctcttcttccgtgatcctctggcacgcgatccgtaccgccagttcttccagccccagacggacttccagcacatctttcagatccttctcggaaatctcagccacctgtgcaccttttctcggaatcatgatcaccaggccttcctgttccagcattcggatggcctcccgtacaggcgtacggctgacccccagtcgctgagaaagtgcgatttccatcagtcgttctccgggcttcagttcccctcgaagaattgcctgacgaagtgtattaaaaaccacatcccgcagtggcagatattcattcatctccaggtgcaaatcactcgccatcgattgtttttcctccatagttgttaaatggtaccgtcagaaatacctgctggcatgatccgctctcccgcagcttctgacacgccttctgtgctttttcttcattgtcaaaaattccaaataccgtaggaccgcttccgctcatcatcgcattcaccgctcccaaggccttcatctgttccttgattctttccacttccgggtaggcgggaatcgtcacatcctgcaagacatttcccatccgttccgtaatgccatacagatttccgtcttccagtgcctttttcatcccatcgatatccggatgtaccgtatccgtattcaaatcaagtgttgtatatacatatttggtagatacactgatccctggttttccgatcagtatccagcaatccggcatcggcggaagtactgtcagtttttctccgattccctctgccagtgcagttcctcgaagcacacagtacggaacatccgcaccgatctgcacaccaagttccatcagtttttctttggatagtccacagtgaaacaagcgattcatgcctaccagcgtcgctgccgcatcagaacttccccctgccatacctgctgccaccggaatcactttatgcagatggatacttacaccttccatgattccacaggtatccatcatcagtttcgccgcccgccataccaggttattttcatccaccggaatatattttttattggttgtcagatgaatccccggctccacactctttcgcatatccagctgatcatacatacggattgtctgcatgatcatgcggacctcatggtatccgtcttcccgttttcctaacacatccaacccaaggttgatcttcgcaaaagcctgtaaacgcatcctttctgctccttttcttctgcacctgtctttttctttctgttttccgatgttgttccgtaacatcagataagcagatcacaagtcgtgcaactatgtactttgtatacaatattcatgtaaaaatatattacactgttttcttcaaaaattcaagcagcacttttggagtttttttctcagttacacccgctgtttttcaccaccagaagtgtctggcgcggtttgacttccccttctccaagatcattcaatttccggatagcctccattgtagtataaaacatttttgcaatatcccacagagtatccctgggctgtaccacatagcatacgattccaggcagttcttccagttttttctgatccggctcccgcgtctggatctcctgtatgaggtcttcctcccactgcattaccagcaaggcattcagattcagtaccaccttcacctcaatctcactgctgtctaacatcatcatcgacagctgttccagatcagcctgcagctgataaccatattgtccattgacctgttctccctcgatcatctgagagaaaggtatcacagtttccatcgaataaaacggcatctcatcgtcactgatactgtaaagaatccttacctgtacaattccttccacctgaatcccatgctctgcccggtgcacactatccaccttcacgctgccctctccatgacagatctgaagaatctttccctgggcttcttccacagatatccggtcactgacacgacatttggcagcatttcttactaccagctgttccaacatctgcgtttctcgccgcggaatacattccagtttcggtgtatagatatccagaagtatcgtttccgtttcttcctgataaagcctgatatccagttccaacaccacatccacaagaaatacccgttcctctccgtccgcatccggtttaatctccagactggactgcaacatcgtagtatcaatatatggaatcatatccatcgtacatcctgtacaggaaagctcaccggaaaatgtcatagtctgttccagccactgcagcgggttggcctcatcatcggacacatacagcacaaatactgacaattcccccctcgctgtcacctttccttcctgggcccgcatctcaagcccccgtacctgaatatccttccacagaatctggtgaatattcggcttgttcgaagcaatcgtaatttcctctttctttcgcagggtgtcttttttatgtacaccaagtgtcagaaccctgatcgtctttttctttgcggaaatctcttcttctcctttcagttccaccggtatcgatatctgcttttcctcatccacaactgccaggaattccacgattgccttcacattcagctttctggaattaatcagatgaatcgtcagatcttcaatctcccactttaagcaaactttgtccccgctttgtaccttatccagatgcaatgtttcttcgatcggaagctttccttccagactggaaactgtttttcccggattgtctgccacatacaaaagtcggaagatcaactgtccctgaatcacagcttttccttcactcacctggacctgttcaatctccacctcgcctttcttctggatgatctgaccgatatccgctttttgatctggtacattataatcctcatcaaaagtaatctgattctgagcttcgcttttcttttgcatcatatgcaaatttttttttcgcagttccatatactccctcctaatcaaacactacttttttgtgacggttttccactttgatcacaagatacggacaagatatcccctccgttcctccatctttccccctcggaccgatcagttttgtctttacatgaagttccgtatcattttcgctgactttttccacacggatactgtaccctccactgctctgaatcccatacccctgtaacagatacagcatatcttcttcctgatatgtcatctgaaattcttcctgcttttttacatccactactttccggatctcgtcaggtatctggtcttcccccaacaccgtatattctactccatgttctttttccttcttctgccgcatccttccacatccccagatacttcctgccagcacaacaatcagaagcaacaataccatactcctgttcatccgcatccccccacgattgatccttattattttatgtggattttttccataaattcctatataataagtgtactgcagtgatgtttcgtatcttcatacgcgaaacatccatctgagaattcatgtatatggaggcacatatgataagatttcttttagtatgcattactgttatcgggtttctgatcctctcaattcctatccttattgttgaatggatcatcggtaaattcaacccctacaaaaaggatatcagctctctgcatctgatccagtcggttttccgttttatcctatggctgaccggtgtagaagttactgttattggcgaagaactggttccgacggatgaagccgttctgtatataggcaaccaccgaagtttttttgatattcttctcacctacacccgctgcccgcggctgaccggctatattgccaaagctgagatggagaagatacctctgctttcaaactggatgcattatctccactgtctcttccttgaccggaaagatataaaaaaaggactgaaaaccatcctgtctggtatcgagctgatcaagtccggtatctctgtctgcatcttcccggaaggcaccagaaacaggaatgaaagcgatctggaacttctggaattccatgaaggaagctttcgtctggcaactaaaactgactgtctgattgtcccgattgctatgaacaacaccgtatcgatctttgaaaaacaatttccgaagatccgaaaaaaccatgtagttctggaatactgcaaaccattccgtccatctgaactttccaaagaggaccaaaaacatatcggcgagtatacgagaacactgattctcgaaacactgaaaaagaacgagccactggtttaataccggtgacccgttcttttttgttgcatactatattttatttttgtaatgcttccactatttttccaaaattcataaaatgagatgctttcacaaggatcgtatctccctgtttcacctgttctcccagatgcatcagaagttcttccagtgtatcaaaggatacggcttccagctgtttttccgcctgtatgctgctttcctttgccgctccggcaatttcttttgccagggttcccacacagatcagaagatcaatgccacaattccccgcgaaagttccgactttcctgtgcagctctttttcattctctcccagttctcccatgtctcccagaatggccacttttcttcccatcgcatctttcaggatatcaagagaagccttcatggacatcgggtttgcgttgtaacagtcatccacgatcgtgtacttttcgttctcaatgatatggaaccgaccacttaatgactgcagactttcaattcctttctgaatctcagaaagttccataccgtatgccagtccgaccgctgttcccgcaagtgcattgtaaaccatatgatgtcccggaatcggtaccaccacagaaaatgttcccttcggcgtatgaatccgacaggcaatccccttcagtcctttgctctcgatctcgtcagcatataacggaaattcctcattcagtccgaaatatatcggtctccttccctgtacttcttttacagtgaccagtttatcgtcatctccgtttaagatcactgtagcatccggtttcagatggtcaaatacctctgtcttagctttcagtacaccatcacgatctcccagattttccagatgacaggtaccaatgttggtgatcacacaggtatttggctgtgcaatagatgccagacgatgcatctcaccaaaatcgctgattcccatctccagaactgcaatctcatcttcctcgcgaagtcggaacaccgtcagtggaagtcccagttcgttattaaaattacccagagttttcagtacctgaaatttctgctccagtactgctgcaatcatctctttcgtgctggtctttcccacacttccggtgatacctacaaccggaatctgcaactgttccagataatatgctgccagatcttttactgcctgcaacgaagactcaacctgaatataagggaaatccacttctcctaacgggcgttcgctcagagtagccaacgccccctgtttcattacctgatcaataaatttatgaccatctgcccttgcacccacaatcggaacaaacaggcaacccctttctactttccgactgtctgttgttactgcttcaatgcactgactctttttttcttccgagccgtaataggtaccgtggcaggcagccgcgatatgttccagtgtaagattcttcatcattacaatttcctctttttccgtaactgtttcatgtccttacagttacttttctttttgcaaaccatcatttacttctgatattttctcatagaaatttcaatcagcttttcacacagctgagcataatcaatacccagaactgccgcctcctgcggaagcagactggtcggagtcatacccggaagtgtatttgcttcgaggcagtacatggaaccatcctctttcatcaggaaatccagtcttgcatatccctcaactgccagtgccttgcatcctgcttctgcatatgtctgcatcttcctggtctgctcctcggtcagaactgcaggacaggtgtcgatggtcgcgcctgcggaatatttattcttataatcgtaaaagccttctaccggggcgatctcgatgatcggataggctttaccgtctaccacaccaacagaaaattctcttccctcgatatactcctctactaccacttcatcctcgtaagaaaatgcacctttcagtgcctcttcgtattcttccggtgtctttgtgatatacactccaacgcttgagcctccacagcaggtcttaaccacaaccggaagttccatattatagtcagccagattcatgctgtctttcccctttttcagttccacaccgcgtggtgtcggaacaccggaagtccgaaagattttttttgtgattcctttgtccatcgccatcgcactgctcagataaccggttccggtatacgggataccgcacagatcgaagtaggcctgcactcttccatcttcaccattcgctccgtgaagtgccataaagaccacatccgctgccttacacagctcaaccacacccggaccgaagaattctcttccgcttgccaccgcatcttttacctgtgcattaaaactgctgatatatgcagcttctgcatctacatcataatctccgtcaaaagcagtggcaggatctgcaccttccttgccgaaaaatacatccacaagaatcgcctgatgtcccctggaacgaagtgccttacacacttctgttcccgatacaatagaaacctcacgttccgtgctggttccagctgccaatactacaattttcatttttcttctcctactctttctttccaaaattattttcgcagtttctgtttcagccactgctttcttctttttaatacacgattaccggtgttccaatctctaccgtattaaagattttctccgcgtttgctgtaggtgtgttcacacatccgtgggaaccgctggttttgtagatctcaccaccgtattcggaacgccaggtatccgcatcgtgaattcccacattaccattaaacggcatccagtaggttacaggctgtgtataaccttcgccttttaagactgcatcatgttttttcgcatcaattgcccagacacttcctgacggtgtatcatatccttttgacacattacccgttactacgggcgtatccaccacgaccacaccatccttgtaacaccacatttcctgatcctggatactgatctctacgtaggtgccaccgatatcgttggtatcccgactctttccttcatacagataaaccggctctaccgttccggtttttccttcttttatgtattccacaagggctgcggtggtttcttttttcttgatgacccatccataatcgccgcccttcaaagtgatcttctttcctgcatgtgtggtaaattcatgggtcagaccaaatgtatcatatttataagcaagctgctgtacataatcagccgctttgctctcatccaccgtccagtttccatcactgtcccggatcaaccagtcttttactacggaaccatctaccgtctcactccgatctccgaagtcatacgtaatatcgactttcaaaagctgatttttcgcatccctctcggcaatcagatcaggatcatccttccataccgatggtttttcatagcagccaagttcttccagattaatttctgtctttccgctttcgattgcatcctttactgccttttccacctttgtgcgatccagtgtatttccttcttcctccggcacgatcacatactcgccattttgctccttcagacaggcatccttgggtgcgaccacattttcttcctgaaaacagctcatatcatccagagcttccttcagttttttctcatcataggtggtcgttactgccagttcgtatgtcttttttgatgagaatgctgtgatccatttccactgttcctgttcttttaacagttcatctactttattatcatccacgtaagtaagatcgatctgggttgcctgaattgtctctgtctttccatccagttccgcgatccgcagtttatactgcccaagctgtttctgaatcttctttttcacctgcgtggctgtcttgctgctgcagtcgataccactgatcgtagttcctttcagaaaatggctggagaaataataggacacccccatatatccaagagccataatcgctacataggcaaccagtacgccaagaaccagtttcttcgcattcttttttttcttttttgccataactataatcccttactttcttccgaacatgcagaccttccggcgcatttttcttttccttctcttttaaaaatctgccggtattcctgcatcatcccttcatttacttcacagacctccgcatatccccctcgcgtctgtctgttccacattattctaacaccgaacctatgatgggtaaagccattttcataaaaaagagcaaaagaaaaagaccatttaccggaaaatttttctccggtaaacagccttagttttcctgtgttttatgcttcaagaagcttatcgatacttactaattttacactcagtacgaagatttcaacggcaaccgccagttcttctactgtcgggaaagacggagcgatacgaatgttactgtctttcggatcttttccgtatggataggttgcacctgcacctgtcagtaccagacctgcttcttttgctttcgcaacgatagcttttgcacatccttccatagaatcaaaggaaatgaaatatccacccagaggttttgtccaggtaccgatctccagaccacccagttctctgtccagaacctcccatactttttcaaacttcggacgcaagatatccgcatgttttctcatatgtgcatacattccctgcatatctttaaagaatcttacatgacgcagctgattcagtttatcgtgaccgatagtctgcacacgcatgtattttttcgcatcttccaggtttgcttcggatgctgccagtgctgcgataccggatcccgggaaagatactttggatgtagaaataaatttcagaaccatattcggatttcctgctttgacgcattcatttaacagctccaggatcacatctctcttgtcatcatacagatgatggatggaatatgcattatcccagaaaatacggaaatcttctgctgccggtttcaggtgcgcaaatctttttacagtctcatcagagtacgagataccggttgggtttgcgtatttcggtacacaccagatacctttgatcgccggatcctctgctaccagtttctccaccatatccatatccggaccggtcggcagtaatggaacattgatcatctcgattccaaagaattcggtaataccaaagtgacggtcatatccgggtaccggacagaggaattttactttatctaatttacaccatggagtgcttcccagaaagccgtgtgtcatggcacgtgctacggtatcaaacataacattcaggctggaattgccataaatcaggatgtttctctccggcacttcgctcatatcagccagcagttttctcgcatcactgataccatccagaatcccatagtttctgcagtctactccgtcagagcttaccagatcggtttcactgttcagaatgtccatcatgccgttactcagatccaactgagcttttgccggtttaccacgagacatatccagtttcaggcccttaccttttacatcctcaaactgcttctccagttctttcttcagagcggttaattcttctttgcttaactgactatacggtttcatagatctcctcctgtgcttttgcttccatcatggttcattgtgcagtcgtttcactttcacgctacacaacgctactaaaaaatattgtatcgggaaagtgaccatatgtcaagaaacacttgcattttcggcaaattatacggatgtattttatttttcaaggcagtttatgcaacttttcttcataaaacttgcattttcaaatagctgttgtattgtctttccggtttatggtattctataaataagtatgtcccttggacattctgactttactcatagaacacatacaggcttttttccaatttccggaaaaatactgttagccagacatacatttatatagaaagaaaggatattttatcatgtggattgcagatcaatggaaagattatcaggtgcttgacacctccaaaggagaaaaactggaacgttggggcgactatctgctggttcgtccggacccgcaggttatctgggataccccgaagaagaatccgggctggaaaaagatgaatggccactaccaccgcagcaaaaagggcggcggtgaatgggaattcttcaacctgccggaacagtggaccattcagtacaaagaccttacgttcaacttaaaaccgttcagcttcaagcacaccggtcttttccctgaacaggcaaccaactgggactggttcggtgacaagatccgcaaagccggacgcccggtcaaggtactgaacctcttcgcctacaccggtggtgctacccttgccgctgccgctgcaggtgccagtgttactcatgtggatgcttctaagggaatggtcacctgggcgaaggaaaacgcagtttcctccggtctgaaagatgcccctatccgctggatcgtagatgactgtgtaaaatttgtagaacgtgagatccgccgtggcaatcactacgatgcgatcatcatggatccgccgtcttacggtcgtggacccaaaggagaaatctggaagatcgaggaggcgatccatccgctgatcaagctgtgtgcaaaactgctcagcgatgatccgttattcttcctggtaaactcctacacaacaggacttgctccggcagtactgacttatatgattgctaccgagttgaaaccttttaacggtcatgtggactctcaggagatcggtttaccggttcgtgataccggactggtgcttccatgcggggcttcgggacgctgggaacggtaatcattgtaaacgattggtactatgcaacattattatgagaaacaggcagaagaaatccattttcccggatctctcctgcctgttttttctctgatctatttcattttcccattagtttgtacaaatcaccacaaactgtttcatacaacgatttcccgtatcattgttcatctgttccggatggaactgtacaccgtagacacgttttgcactgtttgaaatagcttcaactgttccatctcctgcccgcatatctacctggaaaccaggtgccagatcacggatggactgatgatgatagctgaggacactcacagaaccggaatatactcctgagagccatccaccggcaaccacatgtgccgaatgccatacacccatgtgacctccaatattctgattcaatgttccaccaaaagcgacattcaccaactgtatacctttacagatgccaagaaccggttttccagcttgggcacttcttttcactgcatcgatctgtctgtcatccagtgcattgtcgatattgctgcttcctgtatttgcctgtccatatcgtgatggatccagatctccacctcccggaataatgattccatcatactgtgaaggatcatagcctcctgtgacgatcacggcatcaacacccatttctctgacttttgccgccgtagttgccgctcctgcctcattgttaccgataactccgataagaatattcttccatacaccatttggtttcagataataatttctctttccatcattgatccaaccggttttcatggctccgtcaccgccaaaatagtaccaggaaccgtcaacctgaccccagcctgtctgcatcgctccacttccgttaaagaagtaccaggagccacccacaacgttccatccggtgagcatggctccgcttccggcgaaataataccaggtgccgttaatctttttccagctattagtgattctgcttccatctgttctctggtaataccaggtgtttccgtcctgtacccattttgcattctgatccgggtcataattcgggatccagttcccgtcagctcctacccaatatgagccaacccatgtatttgtcagcatcgctccgcttccaccgacataataatttccaatccatcggttgctgcacatggcaccacttccgttcatataataccaggaattatcgatcagatgccatccggctccgaccatggctccattccccggcaccatataataccaggaactgccgatatacgcccagccttccaccatagctccgcttccggtcagataataccaggttcctccacggttcagccagcctcgttgcatcgctccgcttccattcatgtaataccagatgtttccgtctttcacccagccgacctgcatcgctccgtttcccggctgaaaataataccaggtaccaccgatatttccccatccttctgccatcgctccgcttcccgtcaggtaataccaggttcctccacggttcagccagcccgtctgcatcacgccacttccattggcataataccaggtctgtccatcctgaaaccagccgctttgcattgccccggcggaattcatataataccattttccaccgatccatcgccagccggtagccataactccctgatcatcaaaataataccagacatttcccaacaatcgccagcctgtcaatcgattcatattttcatccagatagtaggtttgtccgccactctgattccatcccggatgtggtgcttccaccgtttgcgtctgaaccgcaatctgagcttcctgggactgtacagcgggctgctgtgcttcctcatttatttcatcaactgctgcactttccgatgctgactgttcttctgcctttatctttgcttcagattccgactgttcttcggaaacatcctgcgtttttgtatctttctgcgtttccacttcgacagcttcctctttttttgtctcctgatccatttttgaatcttccgatttatcagcctccgcttctgccagctccgatgtatctgttacactttccgtttcctgaatattttcctgcgccaaatattcccctgtatccgccgcataaacagttgcccccgaagccagaagcaacgcactggtcaggattgcagcagccagtttctttccgtatttttgtaatcttttgtagtacatctttctgtcctccttcgtaaatctttcttatatataaaatattgttttaccagttttttgaccaatccgctccatccaccggttgtactgcgtccattctttgattctctccattcctatcgaaaccactaaggatactccaacaagcatcacaaaacatgcaatccaatttccgcagccataaatcagtccgacgaaataataggaataaatctgattatgtatcaggaacatatttcctgaatgtttcccgagaaaacacattccccgggaaagaaatggaatctttatcagtacatccacagtcagtaccgcaagtaaaaaggcaattatcccatccggaataccaaagtaattgtaacttgtccggatagaaatcatgaaaagtaaaagtactgtttcactgatgatctttatcgctttcccccagcgcttctttttgcaaaattcatccagccgttcaaaaacacgtccttcctgacagccagctcctaacagtaccggaaacaggtagaatgtattggcatttgatgcattgagaagaaacaaaattcccatgctcagacagatcgtcgttaaaatccctgcctttcgaaagagcttaaggatccacggtacagccaaaataatcaaaagcgccagtgatatatgccaccaggtgggattcagtgtcggagttccaaaaagataggaaagtccgaaaaaatctaacagaaaatatactattttactctttaattcccctccgtaggcatctgttatcgttcttcccaatggctgacacagacagatcagaaagaacgcaaaccagtataatgtcagcagtttccagattctcttccatataaactctttaatttctcccactgtcggttcccagtcagcaaattttttataataggatgccgtgattccatatccactgataaacacaaaaatcgctacacatactttgcatagaagtgcataaaagttaatccgttcttccgaaaacggaacaaaactaatcacaaactcctgataattttccgccttataaaacaaatgatgaaaaatcatcatagcaattccgattcccttacaaaactcggattctctttttctgaacatttttagctatccttttctttcgatttttgaaccattacattttggctctttctgttgtattcctacttatatagatacataagacagctttttggttctaatttttctgatttatttacatattaaatttatactggtttcttttccgtttaaaacagctttcaccctcgcatgtccaggtttgcatatttttattctgttgccatcaattatttcgacgattccttcttccgcaacaaaatcgtcccaatatccttgtccgctttctacaatggaaagttctagatcattcaaatcatatggatatgtcaccggatatactttaatattcggagttataatatctcccacattcacatactcctctttgttaccgtcataggaatataaccattggattccttccagttccgtattatttccaacctcgtctacattaatcgtacatgttacataatgaggaatggttccttcaggtccaaaacttgtcagtggatgttctgtcaggatacatgttattctagtctcaccaattcccatggctcttaccacaccgttaccatcaacttccgccaccgtcggatcactggatttccacagaggcagtttgtcaattaaagtattatccggcacgatatttacctcaagctgcaatttatcaccggttttcatactataggtatcctgctcaaaatatgccacctgaaattctgcatgtttcttaacttcaactgtgataaaaccttttttctctctgccttccactacaattgttgcagtaccttctgagataccggtcaggttaccattttcatcaatcgttgctatatcctcatttaacgaatatatttcaaaatatggtgcaatcagatcatccggaccaccaatccagagaaatccataaccacccaccggcaaaaagtccgtatttccatgataagtcaaatgataatactgctctgtcttcacgatacaggatgctttctttcctgcaacttccgcagtaataactgcctcaccttctccaacagcctctacttttccgtctttcacagttgcaactttttcattggaacttttccatgttaccgttttatccacggtagtatttgacggtgtacagttcacttccagtgtctcactgcctccaacccacatttgcagagatgtctggttcaggctgatggactgcagagcggtttcctgttttgttggttcctgttttgcaggttctttttgcttattcggtacccatttcccactgccatctacatagtactgtccgatccaggtattggttgccatggctccgtcagctcccagataataatcacctgcccaggcattttttaccattgccccggatgcatccatgtaataccagcttccgttcacctgtttccagccggttaccatccagccggatccgtcgaagtagtaccaggttccgttgatcatttcccagccgttcatcgtataaccgccatccgcatgtctgtaccaccagcggtttccgctcttcacccagccggcctgtgttttcacttttccgggaatccaggctccgcttccgcctacataattgtcaccgatccaggtatctgcctgcatgactccactttcattcatgtaataccaggtgcttcctacctgcacccagccggtggccattgctccgcttcccgtcagataataccagccactcggacgttttaaccagcccgtcaccatccaaccggatccatcgaagtaataccagcttccgttgatcacttcccagtcattggttgtgtagcttccatcggaatggctgtaccaccagcggttcccgcttttcacccagccggtctgcgtttttgcttttccggggatccaggctccgcttccatctacataattattccctatccaggtatctacctgcataactccgctttcattcatgtagtaccagatgtttcctacctgcacccagccggtggccattgctccgctttccgtcagataataccagccactgggaagttttaaccatccggttaccatataaccgtttccgtcaaaatagtaccaggttccgccgatatttttccagcttttggtcggataacttccgttatcctcctcccaccaccagccggttttgttctgtttccaaccgccggctgcctgtacgctgaccggcgtaaatgttgacgcgagcatcagcacagacatcccgatcgccaaggcttttttgattgttttgttcttcatattcttcctccttcgaagtatttattataaatcctcttggtttataaacgtttaatgcagatattttttcatatcatcaacggaaatccccatccagtttgcccaatattcttctctttcctgctgagaatagtttgctagttcactttctgagggtccgatggtaaatataagtccgcgtttttctatttttccatccaccttcaacaccagaaccgcacagcctgctgtcagtggctgatcggtctttttcatcagttgtatcatacaggatgaattttgtatcagagcatccaaggctacttctttcgtaaagtccttatcatctccgtacaccagctgaacatcctgtgtttccttattttcatctacacctgtaattccgtaaatgtcaaaatcaggttgcacatgcattcccactttgaccttagaagcatagaccgcatcttcttcattccacacaaatggttctaccccatttgctgttctcattttgttaacttcatcaaaaagatatttggcatattctgtgtcataagagtattccacgacatcttcctcaccggttacgatcacttcacattctgcccgtttaccaagaatctctgcatatacggttgctcttcccggtttttgtgcgacaatgccaaaacgatccgctgtcaccacactttcatcgctgcttccccatcttattccataaccgttagcatactgataatttgcatactccacaggttttgatgttaaccgaaggtgtgttgtctcgttcttttccatatataacgttgtctgatcaaaataaagctcttctaggtctttatctgccgatactacctttatctgccgactcaactcgatatcccgtatcgttatatgaagcgtggtctctcctatatccgttgcccacagagtacctaccggagaattgagcataaggatattttcatcatcgacagacattctgataagattggtaatatcataatttcccggctgcatatggacagatacttctgctgcttccccatatttgagataatcagcatccgatgtgggatacttgatttctaccgatatggatgaagcatcttccggtaacacaagcatttccaccgaccgtgaaacgtcggaaactttcaatgcgatttttactactcccgctttatgcgccgtaactttcccatccttgactgtcgcaatcgattcatccgaagatgtccactttgcagtcagatcatctgtcgtattttccggataatactgccagtctatctcctcttcttctcccggcttcaatggctgacctgttgtctgcaaacgaatcgtttccagcggaacccgtaccggtttcgttctgtcccagtttccatccgaatccagataacggtcaccaatccaggtgtttttcagtttcgttccgttttttccgacaaaggaatctccgacccactgatttcgaacaagtactccatcctcgtcgacataggactctccgatccactggctggttacttttttcccatccccgccgacataagaatcatcgatccactgatttttcagtttttttccgtccgctcctgcataatagtcctgcacccactgattttttattatttttccggatattcctacataataatcatccacccagcaggcagtcatcatctttccatcggaaccgagataactgtcatccacccactgattttttctcattgccccgtcgcctaccggtcccagatagtaccagcttccgttgattttctgccagccggtctgcatccagccgtttttgtcaaaatgatattttttctgattaatggtctcccaaccatttaccgtatagcttccatcgctgtgtcgataccaccaacggtcaccggaacggatccactggctctgaacagcatccggtatccatgcaccggatggattgacataacatgaaccaatccaggtatcttctgccatctttccatttccatacagatagtaccaggaaccgttgatcagctgccagccggtcaacatcgctccactgctgttcatataataccaggtagttccatcttttacccaaccggtctgcatcgctccattacccggctgcagataataccatgttcctccgacggatgcccagccttctgccatcgctccgcttcccggctgcaggtaataccacgttcctccgatctgtttccagccttctgccatcgctccgcttcccggctgtagatagtaccaggttcctccgacggatgcccagccttccgccatcgctccgcttccggtcagataataccagaaacgtccatcccagtaccatccggtgcgcatatagccattcccgtcaaatgcataccaggttccgtgaatgtatttccactgattcgccggccagcttccattatcttcctgccaccaccagccggtactgttctttttccacgttcccgcctgtgatgtgacaggcagcagcacgatcataagtgccaataccgccatgcatattatttttttccatcttttctttttcatatgtacttcttcctcactatttggctgcaccacataccgagcagacataccctctcgtcaccacttcatcgtatgcaggttcatccacccacacctgctgcgtcaccgcatcatggtgaatacttccggtctggatctttctgctgctgaatccggcattgtgtatcgcttcgtgttcctgtgcatttgtcgttacatctgctccgcaggtattacaaaaaacatggtattcgtaaacaggctcctcgtatgcctcctgcaccgtcttggtctcataatgcccggatgcctcatgatgaatcttttctgtctgtgctacccactgatgggtatgctgatctgtttctgatatggatgtcccctgctgatttcccgtactttctgtatttcctgtgctgtcagtattttccgtgtttccttccgttccctgtgaaccggtcgcagctgtcggctgcccattgttttctgccgttgactctgtctctgctgccggtgaaacaggctggtttttcgccggttccggtgtcgttgtaggttccgaagttacggtggggttgggcgtattctcaggtgtcggcatcaccacattctctgtatttccggtatcttttgtatcttccttcacactggcttccgtctcttcgtttttttgatcatctgtatccaccagcagctcctgtatctcctgcacctgctgatgcctgtccggaattttcgcagcacctattccgattcccatacagatcgctgctgctgcaattcctgtgacaatcgctttttctatccccgctttcaccaggaacttcgccttcggtatctgttcctgaactccccgaagtttctgaaacagatacatgagaatcggaatcggtgcagctgtccgcaggataactccctttttctccagttcggcgatctcttttccgatcttttttctcgcataattcagacggctctttacagtatttacgctgcagtttaaagcttctgcgatctcgttgaccgacatctgctcatagtaaaacattcccacaaccattctctgcttttcatccagttctcccagaatctggtctatcagttttttcgtctctgcctgatccactacaatctccggtatatgttccagtctttcgtcctgcagttcggcgatgctttttcccccttcaccgtctgcctccgagaataaaacccagtccactttccgcaaatgtgcttttgccgtattaaccgctatctttttgatccacaccggaaacttatccggttctttcagctgtttgatctttcgcaggcttttatagtaggtttcctgtacaatatcctgtgcggtatcttcattatgtataaatacttttacgatatgatatacttctgaatatgtaagcgtatataagtttgtaaatgcttctttatcgccttccacagctctctgaaccagttctatgcggtcttgtttatcatcttctttatcgttatctgtaatctgattgtcttccatattatgtctttccttttttcggagtttttatatgaatagaatcgctttatttagtaatctgctaatctgttttgctttatacacatatcgattctgtatactttacattttatagatgcatgaatcggctatttggttttatatttttctgattttccaaaaatatttttaattcttttgttttgctttgcagttaacaatataaatcccggcacacaccagaagcagtgccactaagctaccggtattaaatgcctgtttcacctcaccaagaatcaatgctgacaggatcacactgcataatggattgacaaatccgaaaatcgccacttttgagacatcgttccaggcaagcaatactgaccacagcgtgtaagcaaccgccgaaaccattgccagatagaagatgatcacgacacctaccgcggtaatatttccaaggtgtccgcccattccgatgccgatcagtgtcagaacgacccctcccatggtaaactgtgttccgctgagcaccaccggggatacttttttcgaatagatattaatcaggatcgtggagattccataagcgacctgcgagatcaggataaatccttcaccggtaagcgtgaatcccatatctagggactttcccatcaggttgatcacaaccacacctgcaaatccaagcacgcagcccgccatttttctcccggtcatccgttcgtttcgaacgatcaggcaggccatcaggatcgcaataaagttgccaagtccggtaataatgcctcctttcactccggaagtgtgggcaacaccgatgtaaaagaagaaatactgtcccaccgtctgtgccagacacaccggaaccgcgtatttcaggatcgtctgatccggaatcagcacttttttctccctgatggatgcaaaaatcagaaccagcagtcccgccagtgtaaaccgaaccccggcaaatacaatctgactcgccgtatccgccgcatccacctccatcagccgataccctgtcttgatcaccggaatcgcgcttccccataagatacaacatacacacgcaagaagcgcgacaatgcctgtttttgttaacgtattttgcttttgtgccatttttcttttctctccccttatttgtttgtatttttctgatagtcctatcatatagcaaaaactgacaaattcaaagcaatttttattctgtttttatatattttcggacaaaaaagtcctgaacatcaggcatctgaggcttaatgttcaggacttttttattcatatatcaatattctttctcttcaaaaatcataggaatctgtcatttgataaaacaaatgccgaaagctaccataagattcaacgtagatctttgcattacaattgctatctcttatacatggttttttcttccctatcatcggtgttaggaattcctgtgccgagctgattccagttcaatataacagaatcagtaaacgcattgatgaccagaccatttaatacatatcgtgattcttttgccatattaatcgcatcagaaaagtatacttctctttgataaaatttcttcccatactctttcatttccgctccacttgtaaacacaggaagataatagctttctccatttttcagaatatccagctggttcttctcgctgatatagggaacccatactttactggtcttcaaagactctatcatgtcattttctgcagaccagcttttctcttttttataaatattcagtgcttctttcaaacttttcgatgcgccggttgaaacaaaaccatgattctcttccggcttcttctgccagtaagtttcgttattggcagcctgggatgtatgatattgcgcatatgcattattctgcgttcttccgtctgtgctgtttccagcaggatttccctgattgtttccaactgagatttcctgataaagtttccattttttatcgatccggatcgcaccaactaaagagagtaaaaaggatatagcaccaatgcctactgatccacctgatgtaattgccagaagtacatatatcaattctattatagccagaatataagccattgttgttgttttctttttaattaagagaattcccagaacaatactgacaaccataaacaacaaattgagctttactgctcccatctggaacaaaccatcaaggcttcctccattctgaagtatgctttgcgatatgtgtcctatactcgatagaacgaatatacctgatacgatagatactacacctgcccaggtgaaaaaggcacgtatctttttaaaattaggtaatgctgtaaattcttccttggtaagcccctttggaagtgtactgagatctactttttgattttctgccatttgtatttactccttttatgtctgctcgtatttccaattgtacttttttatatttgattttatctctactctgtcttcaggacatatcggacttctacacgcctggatgctgcagcgtcttctttgccttctccgtccagaataagattgttttctccattaccgacaacttcgataacattcgcaagttccggataacctgccttaatataatctgcaacagtctgtgctctttcctcagaaagttttaaattgtaagcctcgtcgcctgcagaatcggtatagccctccactacgattgtggatacctttccttcttctatcgcaccggatattaccggtacataggctgcaaggaactgatccagataagcctttccctcatctgtcagcttcgacttgtccaaagcaaacagcacattattatccatctgtaccgttcccgttgactcatcgatcttcgcagaatcaagaccctgctctttgaaagctcccatgagtccgcttgagaccgctgtctggttttctttcagttctcccagctcctgttcactcatactgctcacatctgcatctgtcgccagattatcacttaattcaccattccaataagcagtagaatcataaacataaggataccattcgccatccacacagatggacagaccaccatctgctcctccatttggccgggcagtgagaagaaaaatacccgtgagttttcccccttcgccttcctcggattctccaagatcgtaatcatagcgataggtactatcccaggtaagggcaaactgattaccttcaatctgtgctgttacattctcagctcttttgccatctgcccactcaatagaagaatcataaccttcttccgtactcatagttatgtgaacgattccatcatatcctgctgtagaattctcagcatatccccattcgtaaattccttcattctttttttccgcataaagcatagaaaaagatttaagtcttatactttttccatccttagacaaaatcagatccaatccatcgaagccataagagtattccgtccattcctcgcggtcctgcacataatactccagcttcgtttcatcctcttcatccgtaatcaaagcttccaatcccatatagagtttgtcaccaactacttcataggcaaactggaagaaattatttgtggaataagaatattctccatcttcactgtatttttttctttcgacaaagttggcacgcatatgattatattgccaatactcatgcagtgcgctgatctgctggtctgtcagccccacctcatctttcaattcttcgtcggtttttccggcaaggtccgaattcagaaaatcagtatctgcctgcagctctacggggagaatctgtacttcgtattcttccgaatctgcaagctgtaaagtcatatagtcataatcatctgcatgcttctccgcataggaaccatcttcatctttatactcttcttcgttccgataacttccgtaaagcatataagcctgcggatcggatcccagatttaccaaatgctctatttctatatttatatttttggtttgcatactgacactgctattactgctctcactactattcttaataccggttccacacgccgtaaacaccgctgtggacatcaaaaggccgaaccatacacaaaactttttcatatctttccttttcccttcagcttactccgtataaacactaaaaaactgatccgcctgatccacagcattcagatctgatcccaaaatatcgatagctaacagataacggggatcctgttcgtttaccaaatacacagtcacaccataaaaaggaacgtcatagtttttaaatgtgtattgtgccgcataatgtttctcacctaaaaatgtgatttcttccacattattttgaaattctgtaatctgtgcatcttctcccacagcttctttaatatcttcctcagtcgccactgaattctccgctatggtcttttcttcatcccacacacttgtatcatctaaagttgcagcattttgaatgttcactccaatataagtatcctcatcctctgcttcaaaaactgtcgcgctgcccagtgctatcagcgatcttatccaatcataggtgctatctgcattagaggcttcgatggtatccgcgtttagttcgagattcgttctcttttccaatgtatacgtatccgggagggcaattgcaaagccaaaggatgggttctcatatccctgggatacataccttccgatcatatcattgcttactttatcctcctcaccggcagcatctgcttcggattcgtcacttgtatctgtctcttcctttacagatcccatcagtccatcatctgattttgatgatatattgtcaggtgacatcttaatttctccacatcctgttaacccggataaacacagacaccctgccgcaataagtgcaaaaattttatcttttcgatttctcattctctctcttcctttcttttcctgtaaatgttcagtaccctcgcaggatgctgcctgctgaataattcccttggcttttcttacgttttaaacctttccacccgctttcatcagatatcctcatttacaaggagcaaaagtcccggtatcataccgacccaggtagccgctatctttaagccgttgctgaccggctcccgcctgtctattctgttgagaattttctttctgataggaatacaccatagcagaccaatgccgagagtacagacacccatcacaactgtacagatattcaaagacttccgtatcgctttcagttccttttcatccggataagcaccttccagcacagcaggttctgctcctgtattcgcttttccttctgttctatgtgttgtagtctttcctgcatcatgagtaacctcatttacggaatcccatcctccatgagcatcctcgcctgcggaatcccattctccatgagcatcgtcaccagctgaattccatcctcccgacagcttacctccctcacctggtggtgtcggatctgcatgtggtggctcccatgtctccgacctgcttccaccagtctgtaatgcagccagcgcctgatacatctctctggcagaagaaaatctgtcttttggttcatacgcacatgctttcaaaacaatattctgtaatttcctgcttccatatttgggtggtggcaagggatcacctttttctcttctcagctgtgcctgctcgttttcttcattgctcggtatataatccgcatcgataaaagggcgcttgcggttgttcagcatccagtaaagaaccaatccgagactgtaaatgtcaacctctttcccatattcttttcttgtaattacttccggtgccatatatcgatctgagccggcaatcgttgcctgcgttgtgtgatacatagttctggcaattccgaaatcacctaatttataatctccaaactccgataccataatattttccggcttaatatctctatgtacgatatgtttagactcacaaagtacaagcgccgaacagatatccattccgacttttataacattttcttccggaatacttcctgcatactgcttgatcaacgtagttaacggggtcaacagttccatccggataaaaacatcccacccgatcccgtcttcatgcggttttgttgcaaaatcgtcgcagctgacaatattcgtctgccccttaaacgccagcatgatctgatactcatcgacataccggtggagcatatccttatatttgtttctcacactgacaatatcgtaaccatctgtaaaatccgcttcaatgtcttctttatccttagggaaagaaatcacttttatggcggcatcttccatgacacctgcagaatttcgctgtgcctgatatacactgccgtagccgccccgtcccagcttttttacaatcttccatccctgccagggcagcgacggatatctctcctcttccatttgcctctcctctgattctatctgtttatttccagtacgattgctgtaatattatccttaccgcctgcttctaaagccgctgcgaggattgtatctacacactttgccggactttgcgtctgcagcaacatagtttccaaaaactctatggacaccatgtcactcacaccatcactacatatgagaaaacgatctccttttttaagctgcaggcagtccgcatatgggagcacgcgcacttcctcaggatccattcccatatactgtgtcagatatggttttcgtccatgaatcccattttctttcatataggcttcatcggtctgatcttcggaaatctgctgaagtttcccgtctcgtaagagaaagcatctgctgtcccccacattcacagtccatacctgactgcctgtaaaatacagtcctgccagagtagatcccatcatctctgcatccaggcgaagggtttccttaaatatcctgtcatttacgcgggtgcacattttttccagatagtcttttttgcctgcaagattcgctgcttcttctgcattcaaatattgctctgttgcctttgcagctatataggaagcaatttcaccatattctccgcctcccataccgtcaaaaacagcaaagaaccgatccttttttaaggaaaagcttttttccaggatactgccaagtccattgttatcgcttgccatatagcggcccgcaaagaaaaaattatcctcattgttttttcttcgcctgcctgtatgacagccacaggcggcagagattctcccgaagcctgtcattatgatactattcatcattttcatcggtttcttccaacgcagttcgaaaaacctgcaattgtgcatctacaaaacctacgaaagatacgttctcgatatcctcctgcataaaaaggaacatggtttctgaatcgatataaccttccggatagggaatcgcgatataatcgtaggttttttcatccccttccatttcaacctcaatgccaattgtcattagcttctttgtcgcaccttttaaagttacgacacttccatttggtaataattgctttgccattttattatcctttctcctcttaaccaaacgccagatctgctattgtactgccaagtttgcctgctgactgaatcgctttcatcgcacctgtgacgacatcatatccaaaattacctacagaggttggatctatgcgaagcacagtcttaatgattccatctttcttgtaaagtttatgtgtattttcgatcacgtccttcatgtgaatttctccccacacctttgacgttcctgcggtaccggttattgcggtttgaaactttccaaaagattttccaagctgatctacaccatttaagaaagaaacaatgtccaatcctgtgtagacccagttgcccatcttttctccaagcttcttatctccaaaaagggcttctcctgtctctctgccttgttttacaagaaattcctttaataaatttgtattaccgatcttgttatagtcgccggtataggtatatgttgcatccatcatggcattataaacatcgttacaggcactcaacgcaaggcaggtagctaccggaagtgctgcaccaccggaacttgctaccagagctaccgcaccggcaattttgacgacaccttcgccgacttttacagcggctttaccatattgaagagctttataaacaaagcctttctcatcataggatttttttatttttgaaacagtcttcttcccctttttaataactgttttcgatactcctaccaaatctgctttcaatgagtccagaaaactgtcttttttctttttactttttgcttttactttcttggatgtcttttcggctttcctgtagtcctctatgacatcaatcacaccttgtacctgtccggaactgattccctcgcctgcttctcctccaaacaccttaaaaagagactggtctaccgactgcatggtcgtagcactgttttttgctgcaacagccccactggaaagaagttctgtaatacttgcgaaactttgctgggcactgcttatttttcctgcgaaattatgtgctaacagttcactccagtgattgtttgtgtcattcaaggtacctgtaaccttcgaaaacagcgcttcatactctgctgtcagattctgcatttcaccagcctgcgccaacagggtttccggatctaatataattctggacgccattcttctcctcctttccctacaatttcatacttgtcagctcaatcacggaagacagcttaaaatcttctggtccacctgatttgcaaatcggcattacaccctccgggagattacttgtcctgtttccggctccgatcggccggatcgaaagtatggatccaatcatactttctacactggtaaacatttctgatatatttttctcatctgtcgtaaagttctctgcaaccgttttcatgacatttgcaaaatttccggatttttcactgattttcaaaatctcccgggcattcgactgggtgtaatcattgatagcatccctctctttgcaattccagttgttgtgttccgtgatggatgtcagaattcttgcagcctcctccacttctccataagcgtttgcaatcgtctgtgcaatttccgtaatcgtctgtggattcacatctataatcatcttctcatctcctagcatcccctgatagcacttgcaccttcctgatctcttgaaacaaattttgtcctggcatcctccatataggagagaaattcctgcaaaagttctttcatctgtcctgctttttgcattctctctgtcataatattaatatacgccgtgctcgcctctccctcccaggaagaagcaatctgtgccaaaagtgactgcgtccgcgcattcaaagaatccagttcattcacataggctctcatagaggaaatattattctgcaatccatctgtgtcgattctgatattagccatgttgaatccctccactctaaaacatattttgtgatgccataatcgccttaagcatttcatcctttgccttatacacagcaagcacatggcgaatataatttgttgtttcttccagattattatcgagcctttgaatctggttgatcagttcctgagatttatcataaatagcctgtgccgtctggcctttcgaatttgccccttctgtctgcgctgctctcaggctctgcagtgcattttgcaggatagcctgtgcccgctcgatttttttgatatcctctccggccgcgacatcatcaattgttatttttccattttcatctctgtatgccattttttcagtctcctgtcagaatcttttttacctgctcacaaacgacatttttttcaaccaggcgaagtatcttttcctctgcctgtttcggatccatttcatagaaatatccgcctttttctgcgtaaaaataaagacaggtatcctttccaatatgagtacctttcagaatgatacttctttctgcctggtcagtcgcgatatatgcttcttttttctccgtctgcacattgttttccaaaaggggagaaagcatcctttctatcccctctttgtcctgcaccctgatccggtactcctgtgaccggcactctacggatgtgatccgattctccatatgatgaaatttataatgtacagattctccggcctcttcccgcaagatcagttcagattcatacattccctgataaagaggctgtaatatttctatacatgccggctctacttccagattgcccaggaaatcctcctgggcatatccctttctttcaagactatccagaatttcctgttgttttattttcccccgttttccaatatccttcatagcggcaatataatcataatccaaatattttccgccgcttacttttccgatataatagatttcttccggggacagtatgaattccttcattctttccatcgctcattccttactgacccatggatgctgcaagtcctccgtcagtttcctccatagtattggccgcggtatccagcttctgtgcagctttccagaagttctccaaaagccgtaaactgaccattgtagctttcaaaatttgatacataagctgctgcagcctcaccttcgaatacgccgctcatactgtttacgattgtgcgcatgctgctgatacactgttcaaaattagctttttcactgcgaagacttgttgcgttgcttctcatttcctctggagttacaataattttcatttgatttccacctttctttgatacgtcatttctgacttttttattcttaaaaaacctgtaaggtttttaagctcctgtcatttgctgatttctttattctggatgcattattctatttgtatccctgtatttccaggatatctccattccatacacactcttccagtaaagaattctccgggtttaatcttctacctgttcttttgtccataaagctgaccttttccgggtcaaaccaggacaatggatccagtccttccagcgaatctgaaatatcctgcatcaggtctttgattttctgatgaacaggaagttccaaatcatattcttttttctgatttattcttattgtgactatgattcgattcatctccctgcctcctgactgtctatgcacttgattttcctgccgctattacctgcaaaaaagattccaaagcccttctccagctctgcatttctctggctttgcgtaaaattatttttataaaagccttcgtaatgcactgccgtatcagacagcgccagagctgatccggaagatttgagatccacgccgagctgatcctgcgtataaaaattgaaaaggtcgccctgccggatcccacatagaaccagcacaccatagcctttcgtctttgtcatgatccggtgcagctgcatctgtatatcatccggtaagctgttacattcttttatgtcatcaataagcaggatgatccagggttctttctcgatttccgtcgcagcttcttttcttctctgcatacgactcatcaattcctttaatatctgagcgaatacatcctgtactttctcgacttctgacaatcgcgcataagcagttcctttctcctgcagcttcgccagagattttttctctgtatccagacaatataaaagtgtattttcatccacttccaataccatctgccctattctctgaagcattgtgctctttccacatccaactcttccggtaacagccattgccgtcgtttctcccggctttacataaaccgcttctatgctctctgtatccagtccaacggctatcccctgctcgctgccgctgagatctgccatgcttttcaccgaaatactttccggaagaaccggtatcttcaaggccggctttcctctccatgcttctgtcatgctttctgcttctgctttcagcgccatttcccgctctttatcattttctcccggttcgtacattgccttctggaaattgatcagttcctgatttactttgatcagagcgttacccactctattcggtaatcttgtgtccctcacctgtcctatcaaagtgctgtattcactccggtcagcctgcatgaaagaaattgccccggaaacattggctgtcagcttataaggcacgcctgtattatttacacctgtataaacaaaatagattccttttgatggtccctcactgaaaagacgaacaaatacgtctttataatcctggtttgactccagaatgccactgaagcggtcgatcaaaacaaagacagccggcatctcttcactgaccagttcccggtaagctttcagagaatccactctctcctgattgaaaatttttcttctctcctccagaaaactgatcagcatatttatgagcttgccaagcttttcttcctgtccggatcccacaacgcctcctacctgcgggaaagcctccatacctgccatatctgcaatgatataaagatgtatatcccggggagaatacatgcggcataaagatgttgcaattgtccgaagcagagatgtcttccctgtctgggagcttccaaagaccccaaaattgccttccttcaggaagtccatatactgtactccctgcatctgaagctccggcctgtcaaatataccaaccggcaccgataaccatggagcctctgtcatctcccatttttctccgtcaaagctgccttccaccggcagcttcttccagctgaagagatccggaagttctgttttccacggtgatggctgtttctctatacctgccgcttgggctgttttcgctatataagctatcacagcctcaatttctttcttatccgaaacaaatcgtgtatgattttcttctactgttttgatgcgcgaaccatccatggttacataacgcacttccaaagcaccctgttctttattttcccgataaggagcaccggaccaggcggattgaatcagtgcgaaggtttctgccttctcggaggttccaactcttacataagctcttcctgcctgtgtgatcatggcagcatccggttcatgaatcatcaccttactggcggcagcgttttgcaccttcatacagatctgatactgggtattattccaggttccctcatctaccgcatctgcaggactctgggtagccagaatcagatgtactcccagagagcttccctttgcagctatggaatcaaccattttcttgacaaccggtctttccttgatcagctctttaaattcgtcaaacacaatcagaagccttggtacagcttcctgaaattctcccttgtgatgcccttttatgtactccttgatatccttggcacctaccgaagcaaaaatgtcttctcttcgccgcagttcgtactccagagattgcatacatctgtcaatgccgctgccaacatctgtaataatcccacaaacatgtggcagtttttcaagagcatatgccgtactcccgcctttataatcaatcactacaaatgaaacatcttccggatgataattgcaggcaatggacaaaagccatgaaataagtagttcactctttcctgatcctgtcatacctgccacaagcccatgcgagcagtgtctgtgaagggataaggaaaacagcttgccaccctctccttctcctaaaggtgccgtgatattcacagcactgtcattctttttccatctctccagtacgttcagatcccgcaccctgtttacatccatgcattgcaggaaggtaagcgaagatggaatctgtcccctggcagcggcatcttcagcctcgatcgccgacatctgtctgcaaaacacgtcaaactttctctgcggaatcggcggatccatagtaaaccacattttttcatctgctctgtatttgtaaaaagcagtagccgtcctgtcatcataaggatcgtctacatttacgatatactgacaaaagttcggcagataatactgttcatcatataaaaagattgttgagatacccatggccggatcattctcggaaagcataggcagaaaacactccgtttttttcctggaagcaaaaagaaaaatataatgtggaaccggactcatcccgtttttccattttgcctgaaaatccggatcttttcgttccgcaaggatactgtttaccttttctcggaattttgcataagaatccacatggtctttttctccgcttagtgtggcgctctcaaaagattctgcagtaagtggatcaaaactcaagtatctcgtctgtaattcatcatcccagatatgcggaagccagcgcatagatttccattcttcctcttcttccggatcaaaaacgcctacgatacgaacgtctctgaagaagtgtagtgtggaaagtgaaaccagcagattcttcagtaagtctgttaccttgcgtctgtttccgatcacacccacagaactatactttaggagatccagtctggcaggaacatcatctaccagatgcgtctcctgtataatccgatccgttaactcctccagttcatccctttccatatgaaaatcgttgacatccgtaggaggctttacctctacgcaaagaggggcatacccggctcccatcctgacttgtaaaaagtctgaatctgtcgctgttctctcccataaagaagtcgacatcttatttaaaattgtttcacagatttccggcgcaggattctcctgattcgtgatttctctttgcttttctccaatggcacgaatatgtgctttttctccggcaatatagtccgcatatttccggaagcgttcttcttcttcaaccataagcatcttacgtgcttttttattactgtttccaatcagactcccaacaggagaaatcatcatcgccgcgcgcatagcaagcatagcaggagaaaaagtcgacatggcaattgatgctcccgccatggcaccgctgcttaaaagtggcaaaaagttcgcttttctgatagaaaatttttgtggtttattgggtaaatgcgataatctcacctcatccacaggcaaagactctctgattctcggcgagcgatgatatataggatagcctttccgcgtagagacaatattcgtcgccatcccaggatgatttgtctccttctgatatttgaattccggtgtttcatgaaggttataaaaatatagtctgttctccttgcagatcatacgcagatcacaaatgtcaatttcatccccggatttcagcattgcttttttcacgggacttccattcagataggtgccatatgtactctccagatcctctattcggattctgcctttttcggctgtgataagcaggtgatttctgctcacataggactcattcagaacaatatcattctttttagatcttccaatatgaatctgacactcataaggaatagcatatgattccggatattctcctgtatcccttgtaaaacttacttccatcttcggatatccgcaaatgtgaactaatctggcttcttcgttaatttcctttactgacagaaggattgtctttgcagttaacttcaatacttgttttttttcgttaaaaaacatcccaagctgtccatctataccaagctctgacatcggaaataaatctttttttccggatccaagggtatattttattccgccttctatattcactcgatataagtatttttcagttaaaattgtaactacatagttcatattgttctttcgattccttcctgcaggtacaagatatcttctctctgttgtaactgttcagtaccttcacagttacgtgccaaaatgcatttaaaatcaccttcggtgatggcattttggcttgtatgtctcgctggatactacctgccgaatagttatccgacatcttttcatatcaggttcagcagaacttcaagcttcctgtttttcgggaacgccggtgttccatcttttttcataatttgccaaaccatggaatagataccttcgatcggtggagttgcaaattccactttgacggagatcctttcaccaggcataacacgttttttgaatggtacacataattctctttttgcgtatgaaaagttatccccattgatacactctaaataatactcattccatatagttgttcctgtattttcaatgatccatgtatgcgaatgcagctttcccgagatatttgtgaccggatgacggggtatttcttctattaccttataattcccgccattttttacccgggatactttctcatcttccaaatccaataccatgaaatgtaatcctagtcctaatctatccggaaaagcctcattaccattaccatctttcattttccagttcataacataagttccgggtgtttccggtgcataaaatgatacactgggagacaccttatcccctgggtaaacaacttgtgggagatgaaggattctgtttttttcgtctaattcaatcacagactggttgcattcgtaataacgattttcccataaaatattacccacatttttcattacccacgtatgatttattatttctcccggagatacaatgcccatatccggtgggtattcatattgaaataatatgccgtctttctctgttgaactattactatcctcttcttccttaaaatgtatattatgatgttcctgattatatatatactgtacataaatctgattaatttcttttgggaaaatggccaaaaggacataaaacgtcaggacgttttcccattttgttttcaggcggttcgcctcagtatcaaacaaatattttctgagatttctggaaatctcaacttcttcttcatctatgatctgcaaaaatctgtcattcatgcactcttcagaaatctgaccggataaaagagtcttcgcttttccttctatccttgaaatagtccatggatgttcaaacaaatatgtacgcaatgttgcaatataccgtgcttcttttttgcaatctgaaaggaatctgcttcttctcgctttgtcattccagattttataattaagccatcgtatttctatcggaagaagttcttcgaaaaactcttttttcgaacgatatttgggaggaaccttccaaacggatgggagttttccacatttacctggataaaaaatctcataaacttcttttaaattcattccggctgccctctctttattatcagtaaacgcgatggtgctgagcgatagttgtattctatcattataaggttgtatttgcattgctttttaagttgtaaaaattatttgttctttggctttattctccggaatcccatattaaatctcagccattcacaggtttcaaaaagagtcctccaaagttctttccagttcatttttgttgcctgcatcatatacagcaaaatacatggaatcagatatgtaaactatgatgccgggaaatgaatagatctcttacctttgtaagtctcagatccgccggaatttctttcacttctcctgcacgccacagccgacacaacatgcgctgaaaatcattccattccgggcaactaaaagaatactatattttgaaacaaaaaaacgttgcatctcttgaatcccagtgaattcaagaaatacaacgttttttgtttctgatagctcctttaaagaaaatcttttttatgcaacccgattatccgtcctctcatatcattgagcacaccattctgcacaccgtgattccttagttttcacaagttaaaactcatctcaacgataaactcattttcctctatctttgcaccaatctctccattcatacgtctaacaaattctcttgcaatagataaccccagtccggtagatgttttacttcttgctgcatccgctttgtaaaatctgtcaaatatatgttctatatcaatcttttctgaagctatcacctgattactgattcgcaataccgcccggttctgctctcgttttaacacaatgcgtattttcttttctccatgatccagaccattttttattacattctgaataatccggctcagcccctgtttatttccatctatatacaactgttcttccgtaatctgaatgtccggctggatctcccttctcacccaatcatcataatacgaaaaaacagtttctttcagaatccggttgatacaacaggatgtcagttccagacgataggattcattttttaactttgtgaacatgaaaagttcttccagcatttcattcagactgtgtattctttcatgaataatattcagataacgtctctgctcttcgacattttcacatgcttccataagctggaaatacccgtccagagatgtcagtggtgtccggatatcatgagaaagattcgtataagtatcagcaatcagagtttctttctcctgatagtactgtttctctttcctgcgcaattccagaaggtcattcagcctgtctgaaagcattccgattcctcccagaccaaactcacgatgaatcaacatattactgtcatgtttcataaggaacgccaactggcggcagatgtctttcacctgccgctgatatttccacataataattgattgtaaaataataattcctgccagtatcccgattatgatatacatctgttaaatatccctcttttgaaaaacaacactgcttacagatatcattataataatgaatacacatgccacgccaagtgccaacaaacaatcatttccacctggattcataggaagaagtgatattttcccagtgatcgtatacttatacatctggaaattatgaattcccattttccggactgcgctgtttactaatccgtatacaatactcattacgttcattgtcagacaaatagaaataaccatgctgatcacattatttttcaaaacaatcgcaatcgccatacagatcaatacgagcgcataatgaagtaccaactcagtcaggaaataagagcaggcggcctttggatcgccccactccaagtctccgaagacaatatagttcgccactgcctgcagtatcaatgcccctgtcattgtcagtgccataaaaactgccagtgcaatagatctggagaaaatcaaacctcctcttttttgaacctgaccgccaatatttttaatataaccacttcctatatctgctgttgaaaacaaaacagcaaaaatcaccaaaaacaatgcgtaaaatttcccctgagaatttgcataaaaaatgtcgtatactgtaactttttctccaggttctgtaggcaatgtcaccatcattcccacattaatattctctgctgttggctcagtaaactgctcctgctgcgcagcatcctctttgttcaatgaatcataatctgttttacacagaaaggttgtaaacaatactgccacagccagcacgatccagactatatacatactttttgtccgaaacatccggtataaatccatttttatcatattaagcatggctggcacctcctgtcagattcaggaaataagcttccagttcttcactggttatagaaatcccttttaccggaattccggccttggcaagctccatattcaatgatgcactttcactcagacgttcaaaaatgtgaatatgctctttatctgttacctgataactcgtaaatcccatggcatctaaaaccggaatcgcccgcttcggatcatccagtgtcaattccatccgttcactacatcttctcattaattcatctcttgtaagttcctgcaataagcttccattgtgaatgattccataatcagtagcaatcttcgataattcctccagaatatgactggaaatacaaatcgtcatatttctctctttctgaagcctctgaatcgtatcgcgaacctctgcaatcccctgtggatccaacccattgattggctcatcaagaactaataagtccggttctccaactaaggcaaggccgattcccagacgctgtttcattccaagtgaaaagtgttttgtcttttttcttcccacctgctccagacctactgttttcaatatctcttccacataatctgctttctttattcccaacagcttgcatttgatattcagattttcatatgcggtcatatttccatacaacccgggcgcttcaatcagacatcccacccgtgagcggactttttgcaaatcctttcctttgtatccaaagatttcgatttctccaccggtcggtttggaaagtccactgatcatcttcaggcaggttgtcttccccgctccattccgtcctataaatccataaatggcgccctttttaatatgcatactgacactgtccacagccttatggtgaccatactgcttcgtcaatcctcttgtttccaataacatctcactcaattttttcatctccttttcttatctgcatttataataaaagaggaatcctaatcaaacgcaaataaacagtaaaaaaagagtaaagattatgcatgaagacgataaccgattccccatactgtctcgatgtattcatctgaagtcacttgtttgattttcttgcggatattgctgatatgcacatccaaggtcttcgtctcacccatataaggctcatcccaggcatattcgaaaatatcctctttgctaaaaacctgttttggatttctgagcagtaattctaaaattgcgaactcctgttttgtgatcttcggaagtatcctaccatcaattctgacctgaaatgtatctctgtttaataccatatttttaaatgaaagattatgctctcttcctgcttctttttcttccttatggcgaagctgcacctgaactcttgccagcacttctctgatttcaaatggttttgttatataatcatcagctccactggtcaaaacctctaccttttcatccagactgtcttttgcagtcagaacaataaccggaagatttcccttttttcgtatttcctccagaaccgcttctcctgagattccgggcagcatcagatccagcaacaccagtgcatagccatgcttctgcatattcaaaagcagctttgcttcggttcctgaaaaggcctgttcacaggaatagccttctttggataatgcctcctgaagcagattattgatattagtatcatcttctacgatcagtattttttgcatgcttgtccactcctctgttttatactgtgaaaacattatatttttgtattatatcacagaatttatgctaatcgcataaatttgcgtggtatgtctgagttttctgtgaccttcgctcgcgaaaaacgccttgcaggatattatcagtaaacagtaatgaagaacagtctgactttatagaaaaaatttccataaagtcagactgttcttcatattcacactaattatattttctgagcataattactttttgcgaaaatctcatataactccggtgtggactgcattccatgacacgcaaaggctgttattagaggcttacgcttccggcggaagctcattcttcttaatgacagctatgacttccacatccatgctcgccacatgtatgtccttccccgtggttatgctcatggtgagaacacttaacatccggattataatcaagtgtttcattgataaaagcttctactgctttatccgcatctccggaaactcctccgaaaagcttaataccggctgccgctaacgctgtctgtgcaccgcctccgattccaccacagatcaaaacatctgcgttcaatgcattaagaactcctgccaatgcgccatgtccgcttccattggtatctactacttctgaatgtactacttttccttcctccacatcataaaccttaaatgtctctgtgtgtccaaagtgctggaaaatctgtccattttcatatgttaccgctattctcacgataccttctcctttttcttctgcatattttttgtaaattttctgtttgtaacatcctccaaaactgcagttgctgctctgaccgtcacaaattctgaaatctccaccctcgattctaagtggatgtccatcaatgagtgcatctgctattttcttcctggcaatctcgtaaattcgttgaaccgttgttcttgcaatctgcatagatgctgcacactgctcctgactgtaaccttttttgtccaaaagacgaattgtctcatactcatctaccgtcagaacaatgggtgtgtttttctccgtatcatctgccggaagaaattctaaaacattggggaaatggcagacttttctgcattttactggtcttggcataaactgctcctttctcgcttttcttatataatagtcctataaagggcatatgtcaataatgttttggaagatcgtataactgtttttctatcacatttaaagggtttctgaatcatgttctcttgagctatatcttctccagccagaaattcattgaggttaataccaaaaattgaacaaagttctttaatgtaaacgtattcttgtataggtattatggttctatctggttgcatatatgttccactatcctaagtccacagactgtactaaatggtgttatcaatttgttatcaaattactgttatcagtcaaagattctattgatatcctgataccggttaattacacgataaatctctacatactcactgcccactacggacggcctcttctctataataagattttcattacggatatatgtccaccataatgattttctacatcatacctacaccaataagcaaaataacgtgtcagcaaagacttctttttccctctaatacggttctttatatatacatggcccacagattacgaacctgtccatacatttgtgcataggtccagtgtttctcactgttagtccggctgttggaatcattgattgtaaagccttcgctgtcatatcctgtgagcgtcataaaatgaccggaatccgtaaagtctccgggacccacattaacaatgatcggacatccctcatccagctttgctttaatcctgtcttcgtccattggtacttctgttgcatgaacaccgtaatgctcacatccttcactgatcagtgtccaactgcttccagagtcagggatactgtaaccggcactttccgcatattccgctacagttgccgggttcaccgtcttatcccccgtcagatataagactaccatcgcaagatttgtcggaccacagcctgtatagccaagaagacctccactatactgttcgtacccccagcgctcatcccactgcatcaaaagtggcaccgtatcagcttttgcttcttttgacagattgattttctgctttttgtctttcatttctagataatcgtacacaaaatcgatcgtctcactgttttttttcgccatttctttaagccgatccggatattcatcacttttttcgattttctgcagcttgtcctgctctgtcagatctctgttgaaaaatactcctctcttatcttttgttttgtctgctgcattctgcgcactgcttccctgatcgctataggtctgttctatcatctcattctgaccattctcccatataccgataagtgacattgcacttcgaaccactccaacgccaagaaagagtagcatcagtatacaggcacagattttcaatcgttttttccgtcttcttcgttttctcagtccatatatctgtctttttcttgcttctgctgttgattctttcatcaaaaatacctcctgctgtactgcatagtcacagtatagcaggaggttttcgtcatcctgtcgcaaagatgtgtcaaagttgtcaaatcatcctagagcgtgtctgaaaaatcatttccatctttcttcatctatctagcaacgtcaaaatttctctgcaccacatttcactgtatttaatacagccagatatacacttcaaaatagccatccttcatctttacctgtctttcatcatagtaacattgtaattccagatgtagcaactgatctttcgtatcacaggtaaaaccataccaggactccccactcatactaagcaggttctgaccgatatgcatctcttccagcacattgggaaatctaaactgcacactttcgccatacagcttcgtgtaagtatccgccacagcctcacaccacgtttcatccgggcttatcccccatgtactgtaagtgatgaaaactggcattcccgtcaatgcatccactgcgatctgcagatcgcacaggtccagatgtgcataacaaaaccataaggacaactgctggtcatccggtgacactagaaattccatgttctcatcgatcacaggcacggtatctgcatctgctgtccatcccatgtcagctgttcctgcactcggtgcatctgtagccatgtttggagatatatattctgcctcactgaggtcaatccccatagcttccagcctggatgcatagacttctataaactttatgactttcgcctgcacttgggtcgcagacaattccgtatccagcggatcccggatccctaagtacctttctttcccaaacatcctcatctgctccgcaaatggcgccagttttgacagtctcgtctctgtgtccatcgtataggtatatggcgatacatccccattttctacctcacctgtctgcgttgccagacgatccgcttttgcatccagcataaactgcggtacaaaggtgccggtcaatgcaatcaaaagtgccattatcagggtcaaccaagcatacaaaactttaatcagtctcttcttcatcgtccgtctccttctgtaacactaatatcacactggttccctgatccggttgactcctataggaaagcgtagtatggtgcaactgtgcaattcttacagccagcgccagtcccagacctgcaccatgttctttacgtgaccttgatttatctaccatataaaaagcctctgtgatcttttcgagatcctccgtaggaatcccccgtccacggtcggtgatcgtgattttgtactgctcgttctcacaactgccttgtacaaacacaacatctgtaccggattttaaggcattatccatcagatttaataaaagtgttttgaaaagatcgtattctaaacgcacccatgcttcttctgtctgcagttttatctgaacctttcgtttttctgctgccggcgtgatagtctccaccgcatctgccatgacttcatcaatccgtgcctcttccagctgaaaatctgaccgcgacaacgtgaccagttccatcagtttaaatgaaagagcttccagccgcataccttcattcataatgattcccgccagctgatgcacatcttccggcggcagcgttttctggtacagcgtgtctgcataaccgatgatcgatgtcatcggtgttttcagctcatgggcaaaattggctgtaaaatcctcctgccgtctggccgcatcctccagctctgcaatctttttttctatggtctttgccatatagttaaaagtctttaccagttcgcctacttcgtctcggctgccggtctttgcccgcacaccgtattctccggcggcaaactttctggttgtattacgcaactttccaagaggtctggtgatcgccagcgtcaaaatcagcactagaagtgatcccgcaccgagaatacaccagtaaaaaaattcacagcgtttgtacagtttctcagtatcctggaacagttcttccacgtttttttctgtcaccagcacataactgctgccttttaaagaaaaagtacttctgacctgcagatatcggtttcctgcctttgttacaatctcatacagaatctttccatcctccacactcttttgggatggatcgcttttgcaggaattgtaatataatacatcactgccacttttctctttattttccgcagcaaaatacagcccactctgtgtgccaagcggtacttctgcagaccggacaatctccaccatatctgccctcgtatagctgtccgtaatgttaagcagcaccgtctggatcgaatatttcaccatctggtgctgcgaaaatgctgtattttcttctctttgcagagcatgctccagactgtaggaaaccgtcagatactctactgtagctaacgataccgtcaatacaaacagcatactcaaaaaaatcttatagaaaaatctcacttatgaacctccagccggtatccaatgcggaaaaccgttacaatacggtcattccaatccagttttttacgcagtctctgaatatgggagtcaagtgttctcgtttcaccgctgtactcctcctcccagacagcctcatacagcctggcacgactcaaagctacatttttattgcgtacaagctctatcagaaggttaaattctttcaccgtcagatccacctgtttcccacacttaaataccagtcgtgacaccggatcaatcgtcacatccccgatagtaatcttgttctggatctgctttgtccggcgcagcaccgtctctacccgagccaggagttcaccaatctggaagggtttacttaaataatcgtccgctcccatgcgcagcccccggatacggtctttaacctgtcccatagctgaaatgataattaccggtgtacctgtagatacaatatagtccaaaagctcgtagccactgatctttggcaacatcaaatctagaagaatcagatcatatcgtttttcctcaatacggtctgccccttcctgtccatccagtgcactttcacagtgatatccttcgaccgtcagcgtggaattaattagacggctgatctgaatatcatcttctataattaatatagatgtcatttttctcctcttctatccttttctttatctgtcatgtgcctattgtatcataaagatgtgtcagacttgtaaaaaatgcagagctgaaggtccagaataatttgatgacttcacgcaaggacgatgctctaacaccaactagatacgtctgaaataccatattcccaaacattgtaaagaaaaatatcaaaaagccatatcggaaccattttgaactcatccatcgcggggttggtttatttcttgagcattttaaatctccaccaagcttactaaaaagctggccacgtccacacaaatacttacagaaaaatttattttcaccgaatattgctattcctaacggcaccagagtttccgctcctgctccggtcagcgcaaaaccgaggttcaccaaacctcgtgcgcccttggtcggagtctgttttccatcattcggaataactgcctgtgcatccttttttacaataaagtctcctgcagtgatggatacgcaactaacatagactttcttgcttctctgcagtcatccgggataagttcgccagctacacgaagccattcaccattcttaaatgcacttgctattgacaatcctattttctatctaaaattttattaaactgactaaagaacgttgaagttgttattatcgctgccaaaatatcactgattggctcagccaaaaataccgcaaatactttattctggataaaatgcggcaggataaaaatcaacggaatcaacagaatcaattttcttaagcaggcaagtaataaactaactttcgcctgccccaatgccatgaaactctgctgacaagcaacttggaatccaagagaaaaaatacctgccatgtaaattcttaacgcccatgccgtatacgtgattaattctgtattatttgaaaaaatacctgcaaatatcttcggaaacagaagcataatcaaccagaagcatcccgtaaaaattgtacaaattgtaaattgagtaaaaaatgctttttttactcgatctctattgcctgcaccatagttatagctcatgattggctgtccaccctgacaaattccctgcaatggtaatgttgcaagctggctaacgctggtaataattgtcatagcccctactgcgagatctccgccatatcttgacaaactggaagtaaaactgatagacaaaatactttccgtagataacatgacaaatgtagatatgccaagagcaaggcatggtaagatgatttctttttgcagtttaaagttttcttttctaagatgcagaatcgtcttctttcctgacaagaaacgaaggatccatattgcccctacagcctgactcaaaacagtggcgagtgcagctccctttactccaagatgaaatacgaagataaaaatcggatcaagaatgatattgattacagcaccaagcactgttgtcatcatgctgatcttcgcaaatccctgtgtcgtaataaatggattcattcccatcacgatcaaaacaaaaatacttccaagaatataaatccttgcataatccacgccataaggaagtgtcttatcgctagcaccaaacatcgtcagtaactgtggcgcaaaagtaaagaatatcaccgtcaaagctgcggccataagcatgaggattgcaaaacagtttccaagaatcttttcagctgtcttattatctttctttcccatagaaatcgctgcacgcggtgcacctccggatcctgccagcatagcgaaggcattgatcagcataagaattggtgtaaacaatccaacgcctgttaatgctgcggcaccgacacctggaatatgtccgatataaatacggtcaacaatattatataaaaggttgatgatttgagccacaacagccggtattgcaagccgggccaaaagacgtgatattttttctgtttccatagcttgtgcgtttgacttactgttcatatctgtgttctcctaaatattttctagtcatctcaatataatcaaattacttatgcagtctctcccctgagtgttctggtattctggctaatgtatcaaacaactgatataaccatcattatagcacacaaaccaattaacagatcctgctttaaatcagctaccgtcagttttggcagaggcacaccatcccatgttcttccctgcgtttttaacactcatcctgccatgattctttccactctatggattgatgttctttttccttcatatatccatcaactttccaaattactacttgtccacttccgtaaagaagtattccaatgtatctacaaacatatttgcatcaaacaattcttttatctgttcccgattcatccaagcaacctgtgtcacttcgtccgttgtagcattgcccaaatcaacctctccatcatactcaaacaaccaaacatccataatatcattaaaaatttttccatcaatgattttacgtgtctttgtaaaaagaacttgtccactttccggtattaaatcaacgccaacctcttcctttgcctctcgaattgctccctgtaaactatcttctcccttcacaaccgaaccgcctacacattcccacatcaaaggatatgttggcctatttgcggaacgctgcgagataaggtactctcccttagaattacgaatccagacatgcaccaccagatggtatccgtctatcggtaactgttctcctctgatatggtctttcccaagaagttctctattctcgttatacaaatcccatatttctgcgtctggcacatactccacaatatccccaaagtctgcatgtaaggttttgcagattttgctaagaatcgttaggctcacctcttcatcacggcgaagctttgtcattgtattaggagcaatttctgccttcttacgcaaatccgatttgctcatttctttatccactaataatttccataatcgtttatatgatacagccataatagtatctcccattttatttcctatttcggttacccaaccaacttatccaacatctcgataatcttttctttctcgccactaccattagtcataaatctcagtaatggaacttcatacaactccattatatgattttttaacaaatctcttgaagcctgaacggtatcctctttatggtattcatatccgtcaacttcaatcgccaacacaggctttttaccaattctgttataaatcagaaaatctaaatgtgttgctggattcattgcatactgacattcctgctcatttaatagttctggattcttaatcaacatattcaacggaaaatgacaaacaacatccaggcttgaatacttgttagcagagataatgtcctctatcaatgaatacatcagattttccgaatcatattctgatacttttttgtgcttctgcaagtatacccttctttcctcagtatactgcttgtaaaggtaatcaaaaatcgaataaatcttgctttcagtaacctcaaaattattatactgaatgtaatctatcaattctgttatattacgctctcttgattgctcgtttccagttacaaccagcatcaatttctttttcgctcttgatacagcaacattgattaaatacggatcatctgcaaaatcagatatctcatcatccacagtagatataataatattctctttctccttgccctggaacttatgcactgtagcagcatcaatatctgtaatctccttgcttaatgcttctacctgatttttgtacggtgtaataattccggtttcttccggatttgaaacatattttggtataatctcatttttaataacatctatctggcgctgactataatggttacgctcatgatttcccgccactgtttttactaccgataaaacatcctcttcacccttatccgttgtcattataatcaattctccacggtaaaatttctggttacagaaatttattattttagggtgacacctgtaatgttcccgtaacaatgtttgtgttacatttggcataacatccaaaatggattgaaggaaactgtttgtatactgatatccttcactcacattaaaactgtcaaatatagcttttgctttggcctttatatcatctgtaacaacattaggaagctgcttggtatcacccacaataacaacattccttgcacaggacaatgccaacgcaccagttgcaatatctacctgtgatgcctcatccatgataaggtaatcatacaccacatctgaatttaggctgtttcttgatgaaaatgttgtacttaatataaccggatactcagccaatacatcgtatggttccttccacaaattatcttcactaaaagtttttctaccaatgttactttcatactttcttgccagtttatcttttaggacaaccattgactgtttgcataaatcctcaagcaaattcttattaacactatttaaatacttttcaatatctgcaatttccgcagacaactccgcctgcttcgcacgataatacattgcttgaaaggttgtaagtatctttgaaatattctgcttataagtgccccaatcggttactccatattttaataaagcttttatcttaaaccagaatcctattgccgttttctcttccgaaatcaactgacactcctgccacaataccatccattgctttgaagatagttttttcttgaacttaatactatctgtatgaacatctgattctttaacatattgattgaaatattcctgttcagtaaccaactgtgaaagttcctgccttaaacacgccagtttttcctgcttatcaaaaacactttttaactgactggattgctctgctatttccttctgcaaaacacttggatcttctcccgttttccacgacgaaaaatcgggataagcggcgtcctgatgctcaacaaataatttcttatttttagaacttcctaatgtcgcagcaataaaacccaaattgtatttgggagaagataatttttcatatacgttttctgttgccgaattattattagatactatctgtaccgttttcccttgcatcaatatattggcaataatatttaatatcgtctgtgtcttgcctgttccgggaggtccctgtataacactaatttgattctccattgcatttttcacagccttatactgactgttattgcatccaaatgggaaaatcggaatgtattcgcgtcctgttctttttcctttcaatgatgatggattcaaatactttgctaaagctacatcactaatctcaactttttttgccttgctgcttctgtaaaaattattcatcgcatacgcaacttcttttgtaatctcgatcatttctccatcaatatttgcgtaatactttccttcgtaaaaatatgggtgttcaatatacatatccgttcctcctgaatttgaaatcttgttgctcgtttcaaatccagaaggcggacctctgtttaggatcatgcctgctccgcctttatcctgccgggatacgcccgcagttattggctgagaaattcaggcacgaaaaaaagccccagtagttttttcttaactactgaggctttcgtctctttcttgtattcagttatctatgccttctttcatcagcataatcattgtatcaggataaagttcacaaagtatccgcaatatattcccataagttcatatcattattggaatcgtacatatttcagtataaaaagttcatcgtgttattcttctacttcttttccatctatatatagttgaaatttatcaggatgattgactacatcatagtcctttccgtattctacaggtctatattcggctgtcattaccgattccccatcttcaatatcctctttccataaatagatgttcatatcaaggctcgtcgcatatcccctgtctgtggagaattttgtcgaataaaatgaatcatccttgtacatctgcaaaagttctcttgcaaaagcttctttatccccgatatgtccccggttagcaaccactgtaatattttcatctcgatttacggaaaatgttccaactacatccggttcgccttccttatgaccagattcagatttcccataaatacttcctgcagcaattatcaagatcactgctcctgaaatcaatgcaattatctttttcttcatatttttattttccttttagtttttttactgcgtaattgattacttcttccggtgtgggtctgtctcctttaagtgtcattttcttccattcttcctgcacagccggatcgggattatcaaatcctgcatctatggctatctgcatttctctgcgtacctcttctggtgttgtgttgtacttttctgcaatcttctcataaatagttttctctctcattcattttcctccaatatataagtagaattacaccttgttctatagaactaatttagcatatttctattatcatgaaaagacactttacaacttaaagctgaataaaaggtcaaaaaaagaagagctactcgctcttcccagtttgtcatatcactcttccaataatgtgtgaattactttgatcatttttttctgctctttgatcggaagtttttcaattttttctgtcagctcattggtaacacctgtaactgaatgtgccacaacatcaatcaaaagagtatctgctgaaacatctaatgcatttgcaattgtaacaaaggtatccaattttgtaactttcaagcctctctctattacactcacatgcgtcggacttaaatttactaatgcagccagttcctcttgcgtgagattttttgcttctcgtgctgatttgattcgctgtcctactgctttcaaatccatcgtaacacctccttcagaacgaataatcgttctgaatttagtatacttgtggatatcttaaatatacagaatcgcaaagccaagttctaattctacagaactatattcaaagtttttctttgcattttcgtaaaaaagcgttatgattgaatcagttaaatcaaaggaggtatcaaatcatgaaatcacataaatactggtccttaggcgcacttttctgtatgttgggatgcatttattctggaatcaaaaaatctatgactgcacataaatactttgcctattcttcattgctttgtatgggcatgtccatttattccggtcacaaactggtttctccaaagaagaaaaaaatcactgaatcaaataatagtgagaatagttaaataaaaaattgacctttattcatcaaagacaaagttgctggagaatattttttctctccagcaactttctttatctttaagccattgagatacaatactgtccaatcagcttcatccaactattatatttattcttttcgcacacctttcggcaaatttcattctccatcaatacacagaacatcttatcataatcaaatgcccaaacagcaccattcacatggttttccactgctttctgatctatgcttttcaagcgtgtgaccattttttcaatttctccatttcccaagttaccgatatttttgcagataaaccgaaagaaattcaacgttgcatattcatcatgccaatggaaatcttctggattgtttttaattttactggctctcagctgttctttgattatctgagcagctacacctttcatcgaatcttcgtatctcatattattcacctactcttcctcaacgcccagtgacggtttaaatcttttatcctttgcctgcggtaccacgatctcataaaaataaaatcctaaatacccaagtgcctgcttcttcattttataaaaagaagtcctgcctattcctaactcctgctgtacttccacatctgtcttattataatgactgcaaaaacaggagtgaaggatttcactgagcatcacaccattcggtgcatagaacttcaccaaagtcattccccgatagatcatgtccgacaatccataaataatcatcagattattcatctcccggtgcatctttggcacattcagctggttgttataaatgctcagataactcaatacatatgccatatcttcattgattttctcctggcattccatatccagttcttctaacacaatctgattttccaaaatcaatttctgatagcttgtcatcaattctttaatatcagtataatgtctttcgattgtaacttccagataatcctgtgcatgacttgccatctggaaggtaatttctttcattgatttaattgcataatctctgtctgtcatcagtttcaaaatctccttatcatcatcacactaactggcggtctttcagaccagttcgctttccccatgattttgatgggaagcaattacttactacaacttgcagaagcggatatccaaaaggcattgtgggagctgcctttgctgaccggaatccatcttcttatgtaaaacctacaggaatataaagggaaagtgactatccctgccggttaataatccaaataatatcgtctataccaatctctccttatgctgtttttctctccataaaccatttatccacttcgtaaaacaagtggctttcctgcccctgtatcatacaggtgtacatcattcctacaccgcctgcctttctgctggcgcatcgctcgattttcaaaattctgtcaatactatattttcttccatcctcccatgtaaaaaatatgggaaccagctgtccgtctttccgaaactctgctactacatctacatatactttgttcatgccgacacctcactataaaatctcaattgctcttggcgatgccgggattctgcggatatatccatttaactccaactgcttgattctggaaaatgctgatgatgttgatttcaccccgatcaattttccaaattcccgtattgtcggtggatatccatgttcattggtatatcgtaaaatacactgataactttcttcctgttttctggttaatgcttttttcaaatctatccctccaattacccatggaaataactatgtggatggatcgtgtgcgtaccagcgtctaagtgggataagactttatcctgatacattgccgctcgctgtatactgaaataaccaaaccgtcgtctgatctcatctacagtacgatccagcttctctaacttttcctttttctcctgatttccaaataaatccaactgcacgggaatatcatctaacacaagatccgcagctcggatccccaggcttctaatgggatgttcccatttgtaattatctttaaatagctgaaatgctgcagttacaatctcgtttgtaatattcgttggctgtcgtaaatgtatctgtctggaaaaactatacaatcgattatctcgaactgtaatttctactgttttgcatttaaatccatgtttccgcaatcgtgcagctacactttctgccaatgctatttgaatgatccagacatccagatcattttccagatctctcggtgttgtagtgctattacctatcgactttactggtgcttcatatccttccttgcaaaccggatcttcatcccagccatttgcgaaagcccataatacatttcctatttttccaaaatgactctctaacaacttttcgtctgattccgcaagttgcccgattgtccggattccaagtttttgcaatttcttatttgtctgtcttccgacataaagcaaatctgacgctggaagctgccatatcctgtctttataattttctcgattaaactctgtgattgcatccggctttttataatctgaaccaagtttcgcataaatcttattccaggaaattccaatacttaccgttacacccagttcgtatttaatccgatggctgatttctcttgcaatcgtcattccgcttcctttcagatttctgctgtccgatacatccagccaggcttcatcaattccatatggctcgatcttgtccgtatactccgaatagatttctcttgccatctttgaaaatctcaaatacaaatccatccgtggtggtacaaatatgatttccggacaaatctgttttgcctgccataatgccattccggtctttacacctttttgctttgcaatataatttgctgtcagcacaatcccatgccgggcttccggatcgccacctactgccagaggcattcctgcaaattccggatgatgtagcatttctacactggcataaaaacagttcatatcactatgcaggatcacacgctcactcaaacttttcacctcctagctgtttccttcaatatgatgtcttatcaatttctgtatgtttagtatatatcgacattccggagatagtcaagtaacatcttggttgtattttctccattttggagattattgttgattttatttctaacatacggtataatgcatatagaaaattcaaatagaaatgaggcgaacaaatgcgtgatttcggggaaatattagcagaaaatagaaaaaagaaaggatactctcaatcagatctggtagacctgctttctcaggaaggtattcaggtcactacaaaagcaatctccaaatgggagaccaatgcacgagaaccagctttacatgttttcctgacactttgccagttacttgatatcgaagatatatatgaatctttctttggagaaaatccatataacattatgagtggattgaatgaagaaggcagaaataaattgattgaatttgctgatattttgaaagcttctaaaaagttttctccactgtctgcaaagattatcccattccatcatcctgtagaaattacctgggaaccagtttctgctggtactggaaattacctggaagattctgtaaaagaaacttatgacgtaggacaccttgctcctgagcagactgactttggtgtacggatctccggtgacagtatggaaccactttatcatacaggcgatgtcgcatggattcagaaaaaagattctcttgctaatggtgaaattggaatcttctatctcaacggtaatacttacatcaaggaattacacgatgagccagatggtgtttatctgatttctttaaatcaaaaatatcgtcctatccaagttttggaatctgactcttttaagatttttggaaaagtaatcggaaaatgcaaaggtgcagaaattccgggatttcattagatttcaacagcaggttcatgatcctgctgataacaataagcaaaggaagtgattgaatggcaatcaataatacattaaaagatattcgtgaagaacggaatctcattcaagcagatttggctgaagccataggttcctgcagccagactataggccgcatcgaacgtggagaacgtaatccctctcttgagattgcaatccggctggcccattacctgaaagtgcctgtagaagatatttttcaagttgaagactgaagcataacagccgaaaaaccgaggaataaaatccccggttttccttttgctcaaaaatcagtgtaattccatgatgcacagatgcatatacgattgcttttctcatttgttttcctttctgcctgctccatcaatcaggtcataactcatatctaaaaagtccagtacctttgcttcgctgaccgaaccatccagtaaaatagtgatccagtgctgcttattcatatgatacccaggtaaaaatccataagtctgaataatcatatttgtcatgtccggatcacactttacgtcaatgatatcaaccatctctcttccttctaatcccagtttcgatttttcaaccgtcatgatcactgcataccatttcccattcttatgtcgaagtactgcactgtccggtagtttactccataaatattccggaatcgtgccatactgtttctgcacatattcaaaaatttcttctttcttcacaatctattcaactcctgattcttctgatatcctgcccataatcataccacattttcgtatcccgtactacctgccaaattcttttgcattttcccggttctcctgactttaactaatagagaggtaaaacagcaaggacaggaagtgaggatacacttccgggaaatcccaatttagggtaccctgccctaaattgaaaaacgttgaaagcaacgatactactgtcctctcagaaaggagaacccaccaatggctgaaagaaagagaaacaaagaaatccatttttatgtcaccgaagaagaaaggaagcttatacgcaggaagatgatagaatcaaaaaccaaaaacatgggagcttatctgcgtaagatggcaatcgacggttacatcgtcaacaccgataccaccccactgaagaaacagtatgaggaaatgcacaagattggtgtaaatatcaaccagattgcaaaaaaggtaaataccaccggagatctatatccagaagaaatgcaagaattgaaagagatggtgaaagaattatggcgtatcttaaaatcttccccattaaggtaactgacaagaaagctctggactatattacaaatccagataagacagatgaaaaactgttagtttccagttttggctgttccccggaaactgcagatcttgaattttctatgacaagagaaatggcaaaaaagaatggaatggataaaggcgataacctggcatttcatatggacatgagagccgaaacgctcatttatgatttccataaattctgtgacgatctcaatgagcagttccgacggaacatgattgtcaagcgttccaatctgatagaccgtttcctctggacaggtctttttgcttttgagtaaatctccggtttccttatttctttcagggtgtcggttcttcacatttctttcattctgtccggttacaaaatcacgataccgctgacgataaaaaagctgttccacatcttcaaaagtggcagacagctcattttccttttcgggatttttgaaattgcggaagccattgtaacagtcccaatagagattttgtttggctcgttcttcgtcaatgtgttcgctgttggcaatgtcaaaactgcggtcattgtgcttcggattataaacgccattctttccggctcgtccattgtgccttgttaatttcacatgagttcctccttttctttttgatttccccgacaggggagaagggcagcgaagctgattccttgcggctttctgcgtcaagtaatacccagtactaagtggcgaaacgccacttaactgggcaaggctgccgcccttgacctgcacaggggtattgcattccctgtacccatgcacaaagggttgcaccctctgtactcccgcccgaacaaactgacttcgccccgtctcacgctctgtcagttccttcggttttacaaaacagtccaccggactattttgcaaaaagaaaaaccgacgcatgatcgctttacgctcaatacatcggtttctttatctgaccttgacggtcatattcagttgtggcagattacagatagtctgcaaattgcaaatagaaaataaagttcatcctacataaatgctttaaaaccaaaccaaagaaatataaaagcaattataggaactggtatcatacaaataagaaataaattaaatttcttctttgcttcctctgtattttcttgttttacttttttgcttttttctaaaactataaatggaaaagaaagcaaaataagaccaccaattaaaaacatcgctatattcattcgtaattctcctttttattttctccatatattattgttcccgtctcacaatgaggtaaatattgcactgttacataatctcctttatcgtattcgtgagtataagcagaaatttccaactgggtttctccgttagaaattataaatctatcccttcttgttcgtttatctgttttgttaattgtagtttgtatttctcctgaaaattgtggataatttccactcaatatatattttgcatcttgaaaaattggaaaagcaatcgccatccctaatatcaaaataactgtaataattatcataaaaggaatctcaaaatatttttttatctttaagcaagtatttatctgttcctttgacaaatcttctctactcagatattcttgcttactcggaaatataccctttctaataattactatatacactacacctgcaaaccacaatacaaaaactaacataaatattccaaattcggcaatgattttttgcatggattctacccccgttatgttttacttattgtttatgttcaattaaagaagttaatttcagtaattctgaaaatatctactttgttattttatcatatctctaagctataaatctacaaattactgttaataatcccgaaccaacacaaaattttcacagctttttatcttgctacctgtaacgcacatttccgcaaaatccatagtccccgatactttcctcataggcgataggcaacggtcaaaacatcaggtctgcacccgacattttaaccgcatatcagccctaattatcacattatccctgctgactgttcagcccatgctttttcgcatattcactggctttctgtctgcgttcctcactgtaaggcggcaagaaacggatagacaggcgggactttgccagcacataagaaacaccgccttgaacattggatttttccagtcggcaaaggtcagggtacttcttagaaaaagcagctaacctctttttcaatccggcgttgtgggtgtagatatttgccttgtcctcgccctcattaaagagaacgattgtttctttctcaatcttcgtcagtctcgtcatagcagccctccctacggtctttcaacacacgcagcttgcggtaaaagcagcgataccacctttcgacaccctcagcactcagcttgacggaaagcatataaaacagcttcttcgccgccggatcgggtgcaagggcagccaccatacgcaaacgctcgacagtcgctttcaggttcggacagccaaaggcataaagggcttccatttcattccggttcatcttcattgtgtttccctccttaaagtttaataaatgaaaagcgacagacacttcataaggaaatacctgtcgcttcgttgacgatatgaaattgttggttttggacttgataaaatcagcagtaaatcatttcctgtctgatgatttcctcggctcggttacggatagagttcatggactgtacccacaacatctgattgtctgctttcatggtttctgtcacgccctcggcttgtttcatctgctcaatgataaggctgcacctttccgctgcctgttcgttcaggtcagcaaggtaagtatgcagttcgccggataaacagagggcagagaaccttgcagggcggtactgctccaaatatatcctgtgcagtctgccccacataccgatagggcggcgttcctccggaagcttcaagtccggcacatagtaatcacccacaagaacatagtccagaccgttgctttcatcatggattcgtggtttcaattctgtcatgctattttttctcctttcactttttgccgatttgatttgcttgtggcgttctgttcaacacacacattgctatcagaacttttttcttctgctatacgctcatgctccgcaaattcttttgatttctcacgaatctttttcatatacttacgattggattctcgttttctgcgaagtcgttccgcctctttttcagcagcaatcctttcttcctctgttggttcatgctgctccacaggtacttgaaattgcccgacatagttaagatatatctccacctctgtggtgcggtctgcaccttttccttgtggctcgtgaaccagaattttgtcgataaattcatttatcatggcaggagtaagttctgtaatgttctcatactttttgaccagctttagaaaacgctccacattattttgaccgcctataatccgttgcatatcagcggtgtcagtctcaataatcttgtttagctcgttctgctcattttcataatcagtaagcatactctgaaaaagtctgtccggcaatcttccaatcacattatcttcatagattttcctgataagcatatccagttcgtgaactcgcttctgatttctttcaatgcggttttttacagtttcagaaacagcaatatctttcatcgccgattcttcttgcagagaatagacaaactcctgctcattcaaagaaacataatggcaagtctcttgtatggttttcagaatgatgcttttaagtgcttttgttgaaatatggtggcaagtacagtgccgatcatacttctgataagcaagattataagtggaacattcataacaatctgccggatttgaatggcttatccgcttttcgcctttggtagtgtagtatattctttcacgcccttttcgttgcctgtgattatacatcggcgcaccacagtcagcacagtaaatctttccggtcagaacattaggctcgcccataggatcggcttttcttacattctgtcttaacttttgagcaagcatccatgtttcttcatcgacaataggctcttgtgtatcatcaaaaaccacccaatcttccttgtctgcccttttcgtctttttgtccttataggaatttttgaatgtcctgaagttgacagtctttccaatatactctggtcgggcaatcagagtagtaacctgatttcctcgccacatatacggattttctttgtcatagttgcttgcatgatttccaagtcccttttttccaagataataagacggtctttctattttttcttctgaaagttctcttgctatctgataaggtccttttccctcaatagtcatacgataaattctgcggactacttcagcagcttcttcatcaataatccaatggtcggggttttctgggtctttcaaatagccgtatggtgggatattacttgtatgcgcattgccggaagaacctctggatttcagtacagctttaattttcttacttgtatccctgacaaaccactcattcatgatattcagaaaaggggcaaactcactggtttcttgacagtcactgtcaataccattattgattgctataaatcgaacttccttttctctaaacagaatgtcagtgaaaaaacctacttgcaaatggtctctgccgattctggacatatctttgcagatacaggcagtgatttctccgtttttaacaccttcaacaagtttattccatgaaggtctgtcaaaagtcgctccactccaaccatcatcggtaaaatgaacaagattcgtaaagccatgttttatagcatactcttcaagcatttgcttttgatgaacgatactattactctctccagcattatcatcatcacgagacagtctttcatacaaagcagtaatgccattgcttctatctttttttcttctcatgctgaactcctttcttcaattcctatccactccttacgctcacaaaatatcacatctgtgtactgtttcggtggctgtgtaaaatgctccgatacaaaagaatcacagggaccataatgcttgcctgcccagatatccagctccggctcttctttctcactctttacgccaaagaactgtttcattttattttcgattgccttgaatccttcctgctttgttttctttgccgtgagataaaacgtatgataattacaggtaatctggcttttatgactctcataaatataaggatctgcggttgctgtcagtaccctggcactgatcaggtacaaaatcttgcagtttcgttctttcagtttacctatatctgcctttgctacttccatggtcgggataatcgcatggtgatcagatactttctttgaatttaataccttactcacgtccggctgatattccaggctttcagcataaggcatttccccaagtaacatctgaatcagagtttctgtgctttctcccatctcatctgtcagatactggctgtctgttctcggataagtgacaagcttctgctcatacatctcctgcacggcatccaatgtctgctgtgcggtatagccaaacattctgttagcttccctctgcagggtggtcagatcataaagcttcggagggcggactgttttctctttcacatcatccttttccacttcgcacatccgctccatgcagtccgcagccactttatctgcatcctcttttttctgaaaatgctctgtaactgcatccatatcatcaaacttgatatgagccatataatatttttctttggtaaattccttgatcttctgatttcgatccacgatcatggcaagtgttggtgtctgcactcttccgactttcagattctggttatacagaacggaaaaaagacggctcgcattgattcccaccaaccagtctgcctttgccctgcaaagtgctgactgatagagactgtcataacacgaaccgtcttttaatgacgcaaatccatctttaattgcctgttcttccatggaagagatccaaagccgcttcatcggctttttgcatcctgcctgctcatacaccaaacgaaagattaactctccttcacgtcctgcatcagtagcacagatcacctcatctacttgggaatctctcatcagtttctttaagattccaaactgcttctttgtaccctccaaaatcttgtgtttccaacattccggcacaatcggcagatcttcatatctccattttttatatttttcatcgtattccgatgcatcgcataatccaaccagatgtcctacgcaccaggaaacgatataaccgtttccctccacgtatccatcttttcttgttctggctccaagcacggaagccagtgccatcgcaaccgatggcttttctgcaatcactaatttcatttactcctgctcctcttcttcatcttccagcacattatcgtcaaaatcttcatctctcaggatttccggttctgtactttcttcctgctcatctgcatcgtctacttcccgtttttctgactctgaatcttcggattcatcttcatcctcttccatctcatcctcgtcatcatattcatgctttggtttatagactttgaagtaatatcctcctgccgcagctccgactgcaaccagtgcaatcaaaagatacgttccaaatggacttttatcttcaggcatctgaatatcatcctctaccttatctttctcggctgactctgtcgtttccggcttttcttcctctgcttttttctctggttctgcataaaccgtatctacttccggaagtgtcaccgaatcagaaagtgtaaagttcatcagatctttttcactgacttctgtaagaaaatacacattatcctgagattttgaattgtcaataatcagatagaaaatcttaccactcttagttgaaatggtataaaactcttttgtgccttccgtagctgttttggtaacagaatctgctgtctcgccttctttattaagctgttcctcaatacctgtcactgtccgatcatccacggttccttttgcatctgtcggctcagaagcctgtgcatcctgcggaagcggtgaagtcgttgttttctcagtcccagttgcatctgcactggtcgtagttgccattgcaccattactgtcactggaagttttctgtttctctgcctgcttctttgcccattcataataaggattctgtaacacatacttttcagacgtatttccggcaccgtctgttaccgtaatctcaatctgttttgtagtaaaatctttctgtgtcaattgcactctcagcattccatccttcaagtctgtataagtggtgccattgactgttactgcagtaatcccggatactgtatcattcccctgaatcgtcagcacaccatctgtcagggaagcagagagtgtcggcttttccgtgtcataacacttaatagagcgattctgctcatagaccttcccctcaccatctgtcacacgcacatacactgtctgatttccagtgatcgtgatacttccacttccggttacatcctgccagcttccatcttttcctgcttttgcttcaatctttgctattgagaaaccttccggcatatgactggcatctaccgtaacagcaatggttgtttctccctgtttccagccatccggtttctcaatcgtgattgcaggcgtggtattctcagctgcataagcagtctgtgtctggagcaaaggtgttgtcaggcaaaggaatgtcgttgctgcaagcaagctcttttttaccctgcttttagtaattgttctcttcttctgtttcattttttccagattcatcatcggcttttgtttcctccttctgtatttctaccctgccgggcagttcatttttcattctctttttgaaagcttccaattccggaatactcatatccattgcacggataattcttacaatttccagattttccgcttctgtttttgcaatctccgcagccttgaaccgctttaaatctgcttcatatctggctttggaagcttccattttctctttggctttctcataatctgccgtagctttttcaagacttttcatcggttctcctttccggacggctgatgcagccgcccttttttcttaccatcgtccaaatccatagaaatggctctgccagtatggggaattgatggacgtatactgcaccggatgtccacaatggatcatctgaccattgcctacatagattccgatatgcgttaccggctcccctgcgtcgtaagttccagtaaagaaaatcagatctcccggctgcgcctccgactgggatactggtgtacaaatgttgtacagtccctgtgctgttagtcttcctgtattccttacaccagagtttgtcagacagtagcttacaaatccagaacaatcgaatccacttggggaatatccaccccatacatatggtgttccaagatatctcgctgcttcatttaacaaacgctgtgctgcttcactggtatattcattgccgccaaagcctgctccttctccagtttccagataaaagatcgggtttaaccgctctccatttttcagaagttcaatatgaagatggcttcctgtggaattaccagtatttcctacaagacctatctcatcacctttcgtgacggatgctcctgcagatacactccggctgcttaaatgtgcataccgcagttcataaccttttctgtctttgataatgacgtaatttccatagctgtcgttataagcagaagttgtaactgttccggtcagtcctgccatcacttttgttccctccggtgctccgatatccataccattatgaagctgatttgctcctgatattggatgaatcctgtatccataatagctggtcacactggaataccagttaaaatcaaccggtgtcgcaaacatctgcaagttgccttttgtatcgttgtaggcactgaacagttctttctggaaaaatcccagcctgtcctgacagattgacatcaggtttccactatttaaggtgacattcagcacatctacatcccttgtcctagtcacttccacttcctgacttccattatcatctgccagataacattcccatgtctgatgtccatgtgcagatgccgccgcatgattatcatagtagacgtcaaactgtaccccgtatcttgcgaaagctccggtatcttctaccgtatattcgacaccattcattaccacctttgttcccattggaacaaacggattggaagcatctaccgctaaggtgtgattggctgttggatatgctccactggcagttggtcctccgctccaaataccacaacagattggacaattacaatatccgcttgttacaacctgtcccaaagattctccaactcttactgttgctgtctctgtcacagtctcattgaccgcttctgtagtcagatgatattgctctgcaaacaaagcatccagctccggcttgacctgttcaaacgtaaactcttcatactttgctgacagataactgatcaggataaagggatcatgctcaataggtccgatgttatatcggtattcctcatgtcccggttcttcagattccatgttgttgatccgctcctgcagattagcttccagctgtgtataatacagttccgcttccctgattgcctgatccgatgacagataactggttcctgtgtaagtgatcacattttgtaagaacactgcagagcatgacgtgacattcgttataatcagaaacatcaatccgatcagaactgctacactgatatacaccttccggttttctttaaagaagttggtcactttgccgccaatcttcttgatataatcaatcgtaccttttgtagctgttcctactgtctgttcacttcgcttcgctttggcataatcccgtttgatctgttgcttctgaatctgtttttttagcttcttctgctcctgacgggttgccgcctgtgtccgtttctctgcctgtctctccagtctgcttctctttctggaagccctctgtttccttcgtctggcatttctctgttccagctggtaaataccttcgccgccttcttccaacttatgggcaccttctactgccgcattatcgtcttcatttttactgatctcacggtgcaatgctacggaagctgcacttcctgctttcttgacaacagaagctttttctgttttcacagattccccttcaccaaacttcaaacgggattttttctttccaggagattctccttcatttgcctgatagacctgtgctttcttggaatgctgcttagcttcctttttctttcttgcttcttcataagaaaactttttggctttttctttctgtttctgatggcggaaattgactccatccgtatccatctggttcaatttctccatatctttgtcatttttcacagaagcaccagtttcctcataagcaaacttcaaacgttgtttttgttttggctttttgctgccaccggtctgatttctccggctgtctcccctgttttctgatagatcagcacgtttatctttcagtctccctaactgtccgacttcggatttttctgcaagtctggattcttttccgacttcagcacggattctttttctattttgctgtttactactctgtccaaaatcctcactttgcttctctgtccgtatcagttccggtgcatccctggatttttgcacagaaggacggatatttttcccactccgttcagactggcggggagacttatccacaaggttttcttctttttccccctgttttattcccatctgtacatcactggcacggttactgacacgaacagaagatttatctgtcaggttttcttccaccagaccatccttggtcatcttttggactttcttgtccctgactttcattctctgttctgccactacttactcctccttcttcggataccctttccctgcctgtaataagcagagaaaagcgatgccgaaaacagcaccgccactaaaagttaatacatatgaaattgctcgtaacattgttttctcctttgatttaacctgcttcggaagtctcctctaagcgggttgtcatgattttatagagggaattcttcgggaatctgtctacaaatgggataatgacatttccatagaacaaaagtccttccccctcattactgttggttacataggacagctgggttggtgagatattcagctgctttgccagaatctgcctgtctccggaagcctggttcagcatataaataaaatctgaattttcaaatatattctctatctccctggaagacaataaatcttttatattctgggtgattccagttggaataccaccccatttacgaaatctcttccatatctccacactataagctgcggtctgctcttccttcaaaagaagatggaactcatccacatagtatctggtggacttatgggcagaacggttcatcgttaccctgttccagacctgatcctggattacaagcatcccaatctttttcaactgtttaccaagttccttgatatcaaagcagacaatacggttattaatatccacgtttgtctgatggttaaacacattcagagaacctgtaacatagatttccaacgaagtggccagtcgctgtgcttccggctcttcctgttttctcagaagattgtataaatcctccaggattggcatcttctccggcactggatcggcaagatattcctgatatactaaccgtacacagcggtcaatgatggtcttttctaccggctccagtccattctttcctccaacaatcagctcacacaacgacagaataaaatctgctttcagtgacagtggattgtcttcctcggaataattcaggttcagatccattggattgatatactggtcagataccggagaaacccgtaccacctgcccgtgcagtgcctgcacaagtgccgaatattcggcttctggatcgcagacgatgatatcatcttctgtgatcaggaagcagtttgtaatttctctctttgctgagaaggacttaccggaacctggtgtaccaagaatcagtccattcgggttcttcaaacgtttccgatcaaccataatcatgttgttggataatgcattcagtccataataaagagcctccccttcctgaaacagttcctgtgtcgtaaatggcacgaagattgctgttgacgaggtagtaagccctctctgaatttcaatccgattgactcccagtggaatacaggacatcagtgctgcttcctgctgataatccagctgttttaaggaacagttatatttctgtgcaattccctgcacctggaaaatattgttatccaacttctgacgcttctttgcggtattcattaccagaaccgttacaaggaacatcctctcatttctggactgcagatcttccaacaggttcttcgcctcttctccataagtcacaaggtccgacggaagcacatccatatcataaccggaacgtactgcccgcttctgttcttcaatcttcatcttatccagatctgaaatcttactcttgatcatcttgatcgcagaactctggtcaatggactggatatgaatgttgacattgatgctgtcatccacatccaggaagtctgcaagcatccggtctgtaagctctggtgccagaatctgcagataactcacacttcccatcgttcttcccatcaaaaatgtctgattcttggaaaagttaaaggaagtcggtgcaataaaatctttggtctttaatcctgtttctggaagcatcttatactggaacttaaatggttcaatccgatcctggttgaacacatgatacataatctccagcctttccagaccattcagggaatgtgcctgtgctcccagaaccttaaagttatttaagatatctgtttcgattctttcaagccttggccttgccaccttcaggctttctgcttcgattccaaaagtaatatactttgtcttcaccagaccattatttcctttggaaagctgatttttcagcatagtacggtactcttcacgaatggcattgaagtcatcgttctgatccggaatatcaatacttttttcaaattctgccacatccacctgctgattgataaaggacagctgcacactgatggaagaatcaaagtaatttaagaaatcacagtaattttcaaatatcgtggtcttatcctcatttaaagcaagctgatagttgatgtcataaaactgaatcgtcttggagaaaaaggtctttgtcacctggcagataccatcctgcagcatccgaatatacggaatactctgctgtgcagttgtaggaatgtttttctgtttcctgcgatcccgttcctgcttctttctacgcttttcctgttctctttcttttctgctttttttgtttcttctttcctgacggtttcttttttccgccagggacagacgctcctgctgagcctcctgctttgtcttttttgccatccggcacaccctcctttttcacaagggtggaaatctcctgataaaaattttctgtcttatatggtcttactgccggacagataaacttctgtcgaatgatatttgccaccactttttcaaagggaagaccgtctttttcatacattgccatgaagaaaaacggaagcatgatcgttaccatcaggatggctgcgatactggaaccgattggttttctcatgaccagataaaacggaattcccacaactgcggcaagtgaaaagaaaatcagctgccgctttgtcagatttaacgctacttttgttttgaccttggtaaggtcttttggtactggtacatacgccatggtatgcgctcctttcctgcccgttaatgggcattgaatattgatttgctaaggcttccggtcttgaataatgaaaatgcaagaatcacggtataagccgctactgaaaacattgctgcatgaaggtcactggatatggtcattgcatttactaaaactgcataaattcccacacagaccatcatgaagaatccctgaaatgccagtgcgaacaagccttttaaatagttgtttccgatattgccccattccttattggtcatggtggcaaacggaattggtgctatggaagtataaaggtaaatctctatcattcttccgtataaaataacggttataatgatcgacagaatccgcatggtaatactgatcagcagcgtttccatggataacaagaacaaatcccccagttccatatcttccagtgcatccacaatccttgtgattgcttccgatgcgtccactgctgtgtttccggaaattactccggcggcattgttgaccacatgctggccaacgtcaaagaccgccatcgtgatattgaacgtattcgtcaccagataaatggctacatacgccttaaagatccagaggaaaatgttgtaagtctcaaattcatggaaattgtttttctgcgttaccatcgtaatcagttcatagcacaggacaaatgtgatgatcagtcccgcaatggggacaatcaccgtttgggaaatgttctggatcagattgaagattccggcattccatccctgcggtgtctgtcccacctgcccggctatggttcccacctgctcattgacagacgtgaacatgttatccaaacaggacttgataagcccgatcaggatatcctttatcgcttccgtaattctctcaatgatggtgttcatctaccactcctcttaagagaacaatgttgccagctgtggaatcagggtagttcccagcagcataattccggcacctgccatcagctgttttatgtcttttatgagaaaatatttgctcgaaatgagccttgaaaagattaaaatagattaaattttgatagatttttcttatttatgggagccggaacctctttcgatggttccaagctccggtattggttttaagttgaaatgaatttccattgtgaccgtttcaggagtacggcagtaattttctgttccgtctttctcctgcggttctgagataacgattttactgatcagccggttcagaagattggcatccagttctttgatgtccgcatactcgctaatatcgtcaatccactgctgggactgtgcatccagtttttcttccgtattcagcacactctcattctggaaaagttcctttttgatatctgtctgctccttctgtgtcttctccagcatcttatcaaaaacagattctgtaatcttgtcattgataaggtcatcatacagttttgcaatcagccggtctaacgtttccaggcggtctttctgctttgataccagcttctccagactttccctgtgtccctgtgtatcttcctcgcataactcctttacccggttttccagttctgttccgtctccggtaactgcttttgcacattcctggattctggtaaggactgcatcatacaggtcatcagcgtccacccggtgctgggtacaatgtgctttccccttatggatataagtggaacaggtataaacttcatgctggtctttggtgtgcgtcttcttcaacgtcaacgcaccgccacactctgcacagcggagtaatccggcaaacatgctgtattctccctgttctgtctggcgtttcctgcctttcatctttgcctgtaccagatcaaatacatcctgcggaatgattgcttcgtgggtatccctgactgtgatccagtcctccggagctttatctccctgattgccaatcttgaaacggtagtaccttttctgggaagccatgtcaccacagtaaacgggattcatcagcagggatttcagataggattcatcccatacatatttcccattttccgggtctttcttttcccattttgtgtaataggtgcggagtccccgtttccggtgccaccatgacgggcagggaatctgctggcgttccagttctctggatataaagttaatcccatgaccgtccaccgcccactggaaaattttccggacaatcggtgctgtctcgtcgtcaatcaggagatgtcccttttcctccgggtctttctgatatcccagtggtggaacaacacctgtaaactttcccttggttgcctgcaggtgataggacgcatggactttcttggaaatatctctggaatacatctcgttcagcacgttcttaaatggggcaatctcattgtctccggcaaaggtatccacattatcatataatgcgatataccttactccatgctttgggaaaaactcctccatcagaaatcctgtctgtacatggtttcgtcccagtcggctctggtctttggtaattacaagattcaccagtcctttttcacaggctttgagaagtctctgcaaatcaggtcggtctgtgttcaatcctgtataaccatcgtcctgaaacacatccaccacctgccagccctgtgactgacagtaattcaccagtatgtctctctggttggagatgctggcactctctccggtcaattcgtcatctttggaaagtcggcagtatacaccaactctccaggttgcatttctttctatattgttactcatatatctgttgttcatctgatacctccgttactttgcacatcctacgcagatttcagattactgaactcataatcattatactgcttatctttcattattgcaagtttatcttttgttttcgtgtcacgtattttctgtgcgatcacctctgcaaacacttcttttgcgtcctgatcaccgtcaaaatatactctgatgttgataattttcttcttcactgccattgtaaaacctccattttttgcaaaaaaagagcagctaatccatttttacagattaactgcccagactgttggttacatatattaaaatttttgtattaacatttcagaaattggggatataataaagacagggataaatccctgtcagatgaactgcatattttaattttcccattgaaaacaagaggaatgtgtggtacatttgttataggaaaagcacccactccaaagtggatgccgcctgagttgactaaatggtcttacgaccaccgcctatcctgttggcagacaggataggcatttttatttcctcttgttcttccgatcaagaaaggcaataatcgcaattaacaggctaccaaaagcgatcagtaaactgagtacgcctaagaatattgagataatctcataagctgtcatatcacgcacctcctttctttcatctcagaaccccgaaaggctccggtctgtaaatatcaggaggcagccacaccctgtcacaggtgcttccccgtaacattgctgttaccggataatcataccattatatccgccatattacaattcatttttgttccagattcacagcaatccttattctgtatggatacctgctatttccgtttgattgccttgcaccggcagacggcagatagggtatctataaagcctgccgttcactccaaaattctgccgtcacccattctcccttgtttttttaatcgaatggtattttcctgcttttcattcatccgataatccagttcttctttcatccggcttctggcttctcgcatggttctctgggagattccctgtgcttttgccttttcatccagttcccggattgtgactgcatttccgtctgcaagcagttcatagatcagtttcgttccccgttgcagttttgtttctgtcggctttccttcctttccgtccagaagatcatctgcggaaatctcataagctcccacccagcggaatccttcttcatctccaagtttaaatgccatcgtctcacctggaggtgcaagagaacttttctcatggatcagtactcttgttgtcgggtctttctttactttcccgataaaaagcaggcttctcaccgccgccatgatatcaatagaaccaagtccccggtaagtactctgtgtccctgaagatttattcagatgtccgatcagcacaatcgcacaaccggtcttttcagcgatcattcccagtttccggaataccggacggacttcatttgcccggttcatatccacatcggcaccgataaaagcctgtaccggatcaatgattaaaagtctgacctgattctgacggattgctttttcaatacggtcatcggataacgtcaatgcttcctctgtatcatcaatgaccatcacccgactcaggtctgctcctgcttccaccagcctcggcttaatcgtatctcccataccgtcttctgcagtctgatagatcacattaaaaggttcaatctcttccatgttcgggaaagtcttacggttcgtgcaggctgcggtcagcatcatggcaaaataagtttttccctctcctggattgccctgaataatcgtcagttttccaaatggcagatagggaaaccacagccattctacactggtctgttcaatgtcttcataacacaacatcggcaccagttcttccttctccggtactttcattgtaactgtttcaatgattgatttcttcctgtctgcatttttatcacagaggatttcattccagtcctttcgggacggtttcagacggatgacactgtatccgtccgggatttctattgccaatttctcactggcttcattccctgcatggtcattatccaggcacaggaaaaccgaagtaatctgagggcgttcagaaagaaaagccatcagtgccgcactggaaatgccacccagactcaggtagctccgctttttccagtctttgggaaataattggataaaagaaagcagatcaatggctgcttcaaacacaaacaactgattatccgtccctctgtgacagaatccgtaagatttatcagattcagccacatctccccggtattttgtttcaccagttcccctgcaatgggcatatcttggaataccgtctgcatctctgccaacaaacaccacattatggtgcttcttttcttcataaatatccccactgccgatccattcctccaccatattcttttcaatccctctgttttctgtcagatatctgatgattctatcattattttcctctttctctggtaatcggaagtcaggggacggggcggggcaggtactgttcctgccttcgccttcctccccggttagcatcttgacagcttccggaaatgtggcattgtaaaattccatcacaaaatccaccggatagccacccctcccctgactgtgcctgtaccaccggtttccggataccgttacactgtcatgctttttccaacggtattcctttccgcttttccctagttgttctccctgtgcgctcagaaaagaaacaagatctgtctgatttgctcttataatttgttcttctgtatactgcattttgctcatcctttcccgtctgtcctgctgacagactgttataaactcatgtcatagtttcgctttttcttcactgcctgttgttttgcatcacgctctgcacactctttctttttttcatccagttttctcagaagagaggtcttcttttctggattctgctccgactggttcaacggctgttgctctgctttcccgttttcttcaagaatctctttcgcctgaactgtgtaaaatgtcgggaacttcacctgcttctcccttttttcttctgaacgcccggaagtatctgcttctgccatttcccggtcacgtctggcaatatccgcacagctctgtacctttttcacaaaagttagttcctcctggtacggctgattatctgctttcagctcttcgatccccgcctgaagttcttctttctcccgtttccatctggcagttggcacttttccatttttatccagatgttgtttcagttcccgttcacatttgcggtaataattgatttcttttttatgctgctgataatatctctcccgtcttttctgaaaatagaaatggttatactcatcaatcaatggctgatttgtttttattacctctgccatcttttccagattctcaagttcctttaactgtttccgcttttcagaaatttcttttttactgacagaaacaacaccgttcagttcctcaatccgttcctgcaagtcatccatcgtttctatctgatgtgtctgaagataactgatggattttgcaaactcctgtaaattggagagattcttacctctctgtttcatctccgcataaaaattgggaagtggtggtctgccctgtgtctttttatcataataatcctgcaggctttccagcagtgtcgggttctgcctgcgatccagctctgctttcatttcctcataagctgtcttcatccactgaatggattctttcagagaaataaacatctggttaaactgccggattgcccggttcaattctccgatcaccgttttgattccctttttctccattgcccggacttcatatccctcatggatggtcgggatcaggtcaatcccctgttctttgtaggaacggtggtcgattctggatgccatgtggcactccctgaatttcccatttactttctctgtccatgcccgccgccattcttttaaaagctccggatcattccatccggtagtagaaacagcattgaacatatcttttcctttggcatccttcacccggtttccatcctcatcaagaatatattcccttctctgcttattgccccagattccttcctctgtaaaaggacggattgggacaagcacatggaaatggggattatccggttcttcttcattttccgcttttccctcatggactgccagatccacgatcatgccacgtgccacaaactgctcctggcagaactcttttgccagtctgatattttcctcaagtgtcaattcattctgcagtgcaatgtcaaacgaataggcaagctgtgccttgttgttccgttccacatgctccacctcgttccagagtgtttccctgtcagtcagacgctctggcacatactccggtgtcaggatttctgtaaatatcacacctgacttgctcgtataatcgtgtatcttgttgtaataactgtcaaaaatcctctgcccggaaatataggctgcggaagcgaccaccatctgccctttccctctggatacattccttactgaaaaatgatacagtgccattaactgtcatctcccttctctgtcttttttactgcttctgcaatctgctgttgatctttgtgtaaggcggctatatgagcctgccgcacaatactcttgttgtaactgctgttctgcagttgattcatcatgtcctggacgtcttcctgttccagatctctggacagcggaaatactttctcaaactctgcccctttgacaatcagccggtgggaacgttccctgcgttctaccagcttcttccgctgctccagaatgtttttgtggtgaattgctgcctccagttcctgtctgctcttttccatgttggccttcagttcctccaatgacatggattcatactttggattttttgctctgctcattttcttgtactccttcttttttctgtaaacaaaaagaaccggcttattcatgaatgccgattcctgggtataaaaaactgaggtcgttgtcctgtgattaggaaatgctgacctcagcgtttttgaaatatttaattgttgctccttggaatgaaagtctttgtcaccattgtcgtataaatttaaactcacatcccatatcaggatttctttaattcttccatatacagttcagctatatatgccggaccagtgcaccacagctttgtcttctcatcatacagtgcttttcctgtctttgaacacaaaaaatctgtcaatacctcgtttctgtccttgcctgtctcttctgcgatttcatctgtcaccatagtgatcagaaggtcgattgtataattcattttttcctttggaattgttacttcagccatatcttctcacctttcacaaatttcagacactcaatagctgcctcagttttaaagcagtattgatctttcaatttattcggcagcaactgtctgatacagaaatcgtctgctactttatcacctgcagtcccaaaagcacccgcaagataagcggtaagagtagcgtttgttgcatcatccgcaatctttcctgcaatgatatcatattttgccatttcacgttcaacctcaataaacatttttttctttcggtgagcggcgatacaatgtaaccagtccacatctgcattttcaaaaatatgcgtttcaagattttctgaaagtttgaattcaaaagttgaaatatatccaaacttctgcccctcttcaattgttccggttgcgatggctttggctattgaggttctcagaaaactttctgcctgttcctttgatgtggttaaataaaatccctgtccaaaatcttttctctttgcacatttggcaagatctggctcttttacttcacaataacttccatgatagagaacaaatccatcttttaactcaagcactaatctctatcccctttctttgcaaaaattcagtaatatcttcaagcacagcttcatcgccttcacaatgaaaaatcccatagcatttttctatatatccaagaacatcggcttctttaaacaagtggataatctgttcaacaggtaaatgccactcttctgaagcaagccggattagtcttgtttgcataaaagtaatctctgttttctcactcattatgaatcctcctcattttcttagtcagtaaaaccggaattgttgattaccaaggcatatttccaaatcgactaataaaagttactgttagtccggttttatcaatcattgcaagttttacgattgcgcctgtactgtttgctttcctccgtcgacattcaaatctgttgccgtggcacctggatcagcgcagttcacctcttatgtcttggagtccttttgcatacttccaaaagaacccagtccgcttgaaacatttacgataatagttttattttttctctcattgtcatacaatgcacctacttccccagaatttattttaccacgtattcttctgttcgtctgtcacctgcatcgtatctgcatttaccagataaaaatctaccaattcggtctcgtaattgccatccggatatactttttctaacaccagttcttcgcaggaattaccatctgcatctgtcttggaaccattatcgtacagacagtatctcacatttaccgtattaccgttctttgtttcctgcgtttcgctgacgacagcatagacttctccctttgcattcgccgtgtaactgaacgccatattttgaagtgtattctgctcctgaaggtaattataaactgccagcattgcattttgaattgtcagaccatcatgctgcccttctgtctcgtaatcttctatggtatttccactctgaatatcctctgaatctgttgaattctctgtatccaaatccggtaattctgtagtatcctcttcttgattatcttcttcatctattgtatccgaagaccaccacagaccatccatactctgcataacaaatggattattggttctgtatctccgttcaccaccataatcttcctgcacagttatatacgtatatttgctgtcacaaccagtcaccgtttctgttccatccattccgaacactacactcagaccactcattccaataatcaaaagtgcaaatatcgcagcagctccatagacaattatcaatgccactttgtttttaccgaattgtatggataatgcctggcaattgtgtctgtataaactcacgatcccccagatcaaaagaaccgccagactgattgtaataacagtaatcgatatttctgcgaaacgatatctcacttcatatcccatatcacgttttataccataccacaatccatagaagaaggtactatacgcaagaaccaaagtaatgatactgatccgtatcggatgctcttttttatccggcactgccttcttcagtgcctctgccatctgcgctgccgctctctgctctatccacatagcaagctctgcttttgacggatatgtgcatttagtatccggaatccctgcgtaacacatctggctctcttgaatccctgtcgcatctcctgctgccattgctgtaaccactttcaggtaataatacaacttcaactgtgctggattgaatttatctatacgaatatctgccagctcctgtgcagcccgttcataattgttaaggagtacactcatccgtgccataaccaaaagcatctgattcgctacagcagggtaacggtgatattgcttctcatataaataccgtgcatactcatgtcgttcttccggtgttaaccgataggacttctttctattctgtgccagcatcgcaattcgcagaccataagccaattccaaaattgcaatcagctggcagataaatgcaccaaatccccagatatccgttgtataccgcacataggtcaccaacacaatgcctagcattgccggaatcacgatcaaccattttgtccaacctgatcttctcataaaaatctcctgaattgtttttctgaatatagtatattaccgcacacaccaatcgaccatatacatattgtgacgatgctgttacttaccataacagttgctgtttctaaggtcatctatttatagcctgagaaataactggtttcccatctctgtccaacaatggagtcagtccacctgaatacccacatgcatgatataaataattcacaccagtttccttatccacccatatctcagtagtagttaatgctccctgagaatatattttttcaaatctctcttctttcgccattttcaatttcctcccataatcaatttttcggttttataaaaaatgtttctctgttactttctcgattgtatcatgacatacagttccatcttcggcaatcgtcgattttctgataaatctcgaatgatgctttaatactccataagcataccagtcatggttgcaaaatactttgcagaactctgcatagccatgttccttacaggtatcgaaatacagacacctgctgatttcataagtaaatccactatcatcatcctgcaaaatttctgtctcccaacatacctttttttcgccctccagatcatctaccagagactgtctcacaatcttatagccattcggcaataaatcgacatgcttttttctctttttccgttaccatattttctcccaacttgcacactaagtcataattttccaaacactaaaacttgaatttctatttctgctgccatgccattacatagtctttttctccagtagcttcatccaaaccgctatactgaatctcaaatccttctctttgataaaaggatattgcccgtgtatttttttgatatacatttaagattaatttgtttctttttccctttacatagtttagcaaaattttacctataccttgagattgcatttcggcagaaacaaaaataccttcaatgtattcgttacttaaccctataaaaccctgtatttcctgtttatcctcgtaaacatagacagttgcctgtaatagaagttcttttactaactcaaaattacttttccaatattgagcagagataaaataatgtgtctttatatttgtatctaaccatatttctgcaactttatttatatccactttccgtaattctctaatcataacggtgatgctcctcaaactccgattttctcaatttttcaaactggaatttacgaactacaatatcttttcgagaaaaagatggtttttgtgtgcaattacatctccaacttttttagaagcactagcaattatttcaaatccatttttttgatacaaagatagcgcaggaatattttgacttcctgtatccaaacgtagtgccctacaactatttttttgtgctaattctgtagcgaattttattagtgatgatgcaattcctttaccagacatactcggacgtaccattaaaaggtgaattaccattacctcatcttcagataatttttctttccaaggaatagttgcatattctattggttgaactttatcaataatgatacttccaacaattgttccgttttcttcatatacaaacaaagcaccagcataaatagcccgttctgcatcatctttcgttggataaacccctttcttaaatacagtaaaggctgtatgattcagttcatactggaaatgctcattgtaagtatcttcaatcgaattaacatcttttagtattgcttttctaatcataaaatctctccacaaattttgatttcacactttctttccccttatatgtctatatctgaaatattcagtcacaaactttatcagggataggcatctgtgccgcaaggggatcttccccttgtacgaaatctctgatttcgctgtatttcccggtttgagatttcttgaaatcgggaacagcaccgcaggtcgcacgatacaggcagatggaattgcctgtatagaagtgcgctcttagctttgctaagagaattatgccgtatccggcgtgttatcttttttcgatttcttctactttcttctgataaagtttcatcaattctgcaacacaggctgcttcacttttgtaggcttcactgccttttgtaaatccgtatgcctgcatgactgccatatcattctgatgatgtgcttttcgcagctccggcggcatggtcaattcatcataaagatctgcaaggctgctgtccggatataatgcccttgcatcaagaattgcttgtgcagtctgttcgattttttgccgttgctgagcggtcggcacaggccatggaaagttattgtaaacaatattagctgaatatctataatcacttttcattctgccacaaacagcccgcatccatgccatatgaatatttgatgttaagattgcaaattgatacatcgttgcttctggtatgataaagttaagatctgttgagattgtattataatctaagaatcccattggtacatatcttcttctctcagaacttacttttggaacaagaataaatgatgcaggattattcagttccctgaatagcgtaggtgtttctgcaagttttcttcttcctgcatctggcgaattttctctgtcctgtttacaagcttctacccgtttaagtacaagaggcatctttcttagctctgctggtttaacatctaccagccataaacaccatcgctctttattgttgatgaactcggttgaaccaactaattttttaatataaggtttggcttgtggttcttttcttataaattcttcatagtcttctttttcaataatcaaattaccaccatctgctggtctgtttcccgtcgtcatctgcggaaccttccataatggcttgctacgattgcaaataaattcattaggtgcgtccaacaaatacgcattgatattatttacttctttaaatcttccatcaacatagattctacgttttgattgatttggtgcaatgctgaatcctacgatcacacaatgtacatgtgctttcatgctggcttcgctgtcccagataaacgtccgatgtgcaaaatctatatggatgccaaaccgttcatacaaaggtttccagacacctgccacctgttctccctgcgtaatagaattagttgatacaaatgctgtccgtatattcgttccctgcataaactgtgccgctttaaaataccagcctgcaacataatcaattttcccggcagtcttatatgactttcctttttcatccacataaaccgataaaatatcatttttctgttctttgctctgtaatgaataacccacaaacggtggatttcccataatatacgacacccgatattttggtacaacgctctcccagtcaatctgtaaagaattaccctctacaataaacgcattggtcgtcaacggcaggaaatccagattcatgtgaacgatgtcttccgtctctttcatcatctgtgattctgcaatccacaatgcggtcttggcaactgtgacagcaaaatcgttgatctcgattccataaaactgatcaatggaaacatgaatcggagaagattcatcaaatccaaaagtaatctgtcctctctgcaattcttttatgacttcattctccaatcgccggatactgatatatgtctctgtaaggaaatttccacttcccgatgctggatcaagccaccgaagatttgataactttgtctggaagtctctcagcttcttatcttttgttctctgaaccgatatctgctgaatttctttcagttcatttttcagatcatccagaaacagcggatcaatgactttatgaatattttcaatactggtgtagtgcataccaccggaacgtcttgtctcaggattcagtgtactctcaaataccgcaccaaatatagtcgggctaatttctgaccagtcaaaatctgctgacgctttttccagtaaaagatttctgatttcatccgtaaactgtggaatttcaatatcttcatttgcaaacagcccaccgttcacatatgggaactgtgccagagattcttccatatatggatctctgtcttctggttttgtatcaagcacctggaacagctcaatcacagcttttctcatgtgccttgtatcaaactcttccagataatcatggaacataccatgctgtccgaagatacccgcatcctctgcatacaggcagaataccattctgacgcaaaggatattcaggcttttcattgcacgctctgttgttgggtcaacatattgttttgccagtgcatcatacaacaatcctacaatctcaccagcggcaatggaaacttccatttctctctggagatttgtgtttccttcgtccacaaggaactgtaatcggtagtattctttttccagatcctccaactggataatctccggatcaccgcccggcttttccatatcgtaaatatagaatgactggaaattactggttacaatccatcttggtctttttgaatacggcagttcagaggaatatctttttgcctgttcaaatggtgtcagcatggagccatcggactgccggatagcagccgtcaggcttttgttgatacttttctgttcaatcatgacatgggttttctcaatatacccgtcaataaaactggtgtggtcaaggtgtacctgatcttcaaaagaaataaactgtgagatttcagttactccaaatactgttgtcagaagctccacccagaagatctggctgtcgcctttttcatatccacggtctttccagtttttcgcaaatgctttcgccgctgctctttgctgtgtgtctgtcattgcagcaacctcctgttattcatcatctgtaaattccatcatttcatccacggtacagtccagtttcttgcagattttctcaattgtctccattgatacatactggttttttcccatcctggcaagaatatttccgcttatcccggtgagatactgcatatctatccgcttcatatttttatctatgagcattttccataatctgttataacttacgcccataagctacctccatcttttcgtttaaacatattttgattatatcacgatttcgttaggttgaatacctgtaatttttgatatcttctgtaaaatggaaaagaggataccccgacaaagggcaacctctccaacaatttacttcagtttagttaaatggaacctcaccttccggcacttccatgaatccatccttatctgttttcggtgtttccgatgaatcagctccgacaccattatccttattctgggcaaattcatgttcttccacaatcacatctgtggtataaattgttttcccatccttgtccttataattgccggtgctgatacgaccgccgatcacaatccgcattcccttgtgaagatatttctgtgcaaactctgcactttttccaaatgtgacacaggaaataaaatctgcttcctgttccccgtcacgtttatatcttctgtttactgccagtgtgtatcttgctactgccatatcattgtctttcccggcatatttgatctccggattcttcgtcagtcttcccattaaaatcactttattcataatcgttactgtcctttccgcagctacgctgccattgcatattcatcatcatctgtttcattgtccggcataaccattgcacatgcttccggtggattggtatcgtccggtgaaaacattttccggatcatttcgtacatgattggataccgatatgcgatttcttctcttgcaaggaatctgcatactctgtaaagattctttttcatttcttcatcggttgcaagcatggtagccagatggattctctcccttgtatagatcagattcgggcatccaaaccagttgatcagttgcatttctttcattttcagttctgtcataaactgctcctttccgggcattttgccctgtaaacattgtcatcagtttcattcgtccggcggtctggcgtgcgcttccctatcacctgcagccgtctcagactgtctctgcctgcattagcaggtcactgaccataaggctccggtcagccgcccatcatcgggagtgtcattatgattccgctcgctctcagaaaaagaaaggtcttggcagaactcctggtaggcttccagggtgcacttatcggttgtcaaggttcagcgaaggaacattccaaaacgtcctctgattactaaagtcaaatgacctgacaagatgcaaaagattcgtgatatttttttgcatttttatcattttttcttttacttttgttagtcccttcacttactctgtactggggcaggcaaaagcggacatacttaggtaaaaaatttttaaaataattgttcctctacctataaagcctgagaaacggtatttaccaacccccttttgcaagtttttttcgcataaatgaaatattccctcactaatagcaagtttcagagggcatttggacggtacttttgcagaaaaaattatttttccactaatcacacgtgggaacttgaagaatgtcagatgattttgaaaaaaaatcaaaaaagaagcaccgaccattatgatcagtgctcgtaagatgattattcaaatgttactgtccttttcacacaccagcctttcataatccaggaatccacggatgtacatttcttttgccacaattccctccattgcatttttcgctgaaataatcctgtccaatgcctgccacatctcctgtccagcatctctgaggacgggttccagtatttctatgtaatgatgaatttctgcttccagagagaacatctccggatcagattcaagaaatttttccagctcccgctgatattcttcataatagctttcaatcaattctcttctcatatctggaatcccccttatacataaatcagttcctgtttgatgatttcagaagcccggttgcggatattgttgcagtgatgcacccattccataggattctgtctcttcaattcctcggtaattccctccgcacttcgcatctgagcttcaatcaactcaaaacgttcctgtgcctgttcattcagatctgccagatagctgtccagtctggcggtcagaagaagatatgtataagttccagatttatgttctttcagatattccttccgaagcattccccagaagccaattggtctggtttcctccgggtagtaaagattcggtaaataataatctccaacttttgtgtattcgattttcatgatgtctcctttcgctttgcatgaaattgtcatgttatctgcgtaggatgtgcattttccctttaaaatcttttcacatagaagacattaagtgtttgatgccctggctcttagcgccgggattgtcatttccataaccttccagaagatttacgacaccccacacgccaagacctgcaccaattgcgactacaagagtttttaaagttgtaattgcactgctaaaaaatgccatatacattcaccaaaactgacttctttcaggtgtttacgggaatgaaaaacaccgactaaaaagccggcgcacctaatgtcagttattcctttcctcattatttttcgttcattcccaaggttactccgacagatctacatgaattacttccaccgcttcttcagatttcggtgtgtactgcggatttaactctttctcaactttgtatcggttcttctcgttttcatctgcgagtagccgatagtttttgtgtttcgtgatatcatatttgtccgagaaaaatggtctggcaccacggatctgcaggatacatttccctccatccataactgcgatttcatcttctgtcatcaactgtttgcctgttttctggtaattcagtccaaaggatttctgattactccttgtctccgaagtgttatacaggtcaatagtttccttacccagaagctcgctcatttcctttaaggtggttttctctttgccaccaaggaaaagtgtagtatcacagttgcccagaatggtatctgcactatccttgtacattgcctttaactggctctgtgactgcaaaataatagaagcagagatttccctgcttcggatagttgcaatcagcttgtcaaactgtggaatctgcccgatgttggcaaactcatcagcgatgacacgcacatgaactggcagtcttccaccatactcatcatctgccttgtcgcaaagcagattgaaaagctgtgactgtaacatggcaatcacaaaattaaaggttgtatctgtatcggacataatcaaaaacaaggctgtcttcctgtccccgatcttatccagttccatttcatcataagacatgatctcacgaagttctgcgatatcaaatggtgccagcctcgcaccacaggaaataagaatacttttggcagttttgccagtaacaaaatgtcaatagttttttaatcatttttctcaaaaaggcaaaaaaatagaacgtatagtttatttccatacgctctatctcacatttcatattaaattttgaattctacaaattttttatatttcgttgtcaatatgttttctactctaacgccccttttacttttttgtgggaaatgcaccgctcctcccgattggcaagtgccttcaccctgccttctaacagaagttcccttcctttttcatttcttgtatacacacagtcataatttccgatatacggatgcatgcattttgcaaaacgttccgcatcctccttctttttcgaaaaacaatttggaatggcatagaaaccattcagtcctttgtgtcccttctttttcacaagtatgtaacgctggttgtcgatcacatcaaaaaattcattgacacactgtgcgaacaacgctttatccctgccgcttccaccggacagataaataatatggttatccggtccgtttgattctgtctcaactttacagtgtgtttcttccagaagctgttgctcctctaatgctttgcggattccatttccaaatgcctttaatctttttagcggacttcccaacatgaaaattttcgggaaacgtatcataattccagccagtccggcagcaatgaagaagtaacaggttccggccaggataccattttgggacgctgcagcaacaatacctgccccaattgccccgatcagacacagaattcctgacaggatcattgtaagaatcgcatcccagaaaacaacacttgtgacaaatttgtcttttacttctgtctcatccacaatatccattttgtcatagactgcaagtgcactgttccaacgttcttttaacgtatcgcgctgccccgacattttcagcatttgtctgttaatcctgtcaatattcgttttattaaatggcgttttaataactgacaaccgtttcattccattttcaatcgtattttctgtataatgcagaccgagaaaatgttccatccttcgctccagcatactgtaatcttcactgatctgattgtcatctgcctttagcacttcgttccacggtcttaaacagactaaatgccagatgttacttgttttttccggatgttctttcatcacacggatggcacgccctctcatctggttgcttaacataaatgagcctacaaagcttgcaaggatcagggaattgatacaaggagaatcccatccttcccctaacagcgattttgtaccgatcagcacctgcatatagccttttgagaaaatatctgttaccgcccctgtgagaaaatgtgcatttccaaccgctgtcactttaagataatctgtttcagaaagatttccgatcctgctgaatgtaacttttccgctcattccgatcgcctgctctaatgcttctcttgcctctgccggaatgatcacaatcgttccacaaagcaccccaaaacggatttgttcgtttttcttttcattgtcacgacggagcatctcaaaaaacggaagcactccaagtgagttaacatcatattctgtatttccaattgctttttcatattctttccggatgtaatctgtcaaaacaagcagcctcaaatcctgaccggatgcctcatattcatggaacacaatatcacggatgctgttacattttccaagggaatttgtgagcattttttccactgccgcacttttcgtcatgacgacttttttcttttctatcagaccgtcggattttaaatcagcaattagcaattcacgatatgtcttgtcacacaggtatgaatccacatcatcatacaagaatccctgtaacagacgctccatccattgcacattcatgtccggtaatttttttgcccccaaaagcctctgtaatctggacggaattgcaatatttttgctctgtaaataaatcaacagtgatgccagatatgccggattatccagaagcagatcatctgagagctgtccactgaaccccttatggcttcttacgtacgtaaggaactgagtatcccgcatgattttttctgtcattgctttactgcgttcttcaaaacgtctgacttccttctcttcttcttttgttggatagttgaagtaaacataatcctgatgcggacagaggcttccctcttttacgagctccggtatcgtaatctcttcatcgatctctccacacatattcatgtaccgcgtccacatagccggtgtggaatcatatggtggtgttgctgtcaaagcgatgattttaaggttattcacctgttttttgaattcttctaatgctttccaccattcacttcgcaagtggtggcattcatccagacagagtacttcgatcccagcctctttcatcgtcccaaccagatcaaaaccgctgtaatctacttcctttgtctctgttttcgccgggcactcgtctgtgcctgtgccactatcctcacctgcatcttcctgtattccctgaaatcttgtcatggcactgtgtaatgcctgataggttgcaaccgtgatcgcctttggctgttttaaattctgtgaaagataatcttccccctgtatgccctcacataaaaaagcttcctcaatccttgcgatccactgctcccggatcgtaatggatggtgccaaaatcagtgcttttccgttcatcctgcggatcagttcaattcccaatgtcgttttcccggatccgggtgccgctacaatatgtatttttccatctgccatgtacctgtctgcgtgttccaaaacccttgcctgataccttctccatgttcctttaaactctaaaataccttcgtaattcataatcatccattttcctctgcttattccactttttctgtggtctgtaactattatatacaactgccaattttcttacaagaaagattccgtgtccaataagaagtatgcctatgttgggatatttaaatcattctgcatcctcaaagcaaatgaatttaaatagaatttcaggtgtgcctgtgataaaatattaataagtttaacaactgaaatttgactgtatcattttgttcatcaaatttattattcataaggtgtctattttgatcctaagaagaaatgaattttaggtcttgtatattcatcaaactgatcttctgtctctgtatcaaatgaacaagacaaactgataggcgcatcctgatcatagaaacggaaactcttataaaatgtcccatttagaaattcatctttaaattgttgtggaatagcctgataagataatatctcaggattagatacggatacatttaaattctcaaaagacttttgtaatgtcgcaaaatctttttctgtctgcattaaattctcttctaaactcttattaatatccacaccttctacatatgagatattgatgatagtaccactattattgacttgaacatgaacataacaatcagtagcacctgaatctcttaaatatcccataacagtataacttgatctactacgtgattcatttggattgtctgcatgtactcttacacatacaggttctaatgccttttttactatttctacttgttttgcagaagctgcaattctttgatccattgcctgctttccttttatatattgaggtatataagtaccgactacaataagtattgggataactgcaaaggcaatgagttgtttttttatatcaggaatagggattctataagcatgtgccatgttctcggcattacttcctgcttcagataacatatctatagatgtagagactgtacttactgcaccagccacctgcatagcacttcctatattctttgcagtatcattatcactttctttaaggaatcgaccaacagcttgtgacgccaaagcagcagatacctctttagaataatctgtttctgactgtttcacatttaatctacctataagagatttccatttcttaccgttcattccaaacttaggggcaagtgcacagaaacagaatataataacatatataatgacaaatcctaatgcagtaaacatccctgtaggctgaaaacctttgttttggaatactaaatcatctatcatctctaatggtactattaatgcacattgtacaaatgaaaagatgagtgcaaccactgcaatctttggatatatacaatatctttgaatcatttttttctctttattgttaatcatggatatcacctctgtttctagtataacttatttttgaatgaaaaaagagcgatattttgctcttactatatttgtttcttaactaaaaggaaattacgaatattttgatgtttaataccatactcaagtttgattgtatcatggttcatccttgacccgttagagggcaacgcatttaatccgaacagctcatttaaaataatattattcctttataattctacaaacttgaattttgtctgattaccaattatcttttgtaatttatagctgcatcaaaaagaataccaatacactcaagagtatcgttactattcccattatgataaacatcatggaagtaaaactttttgaaattggtctatcaacatagcactttttaggattgtttggattataataaactgtcatcttactgttgataggccacaactgctctgcaagttgacgcaaatttgcaatggatccagtttttacatgtagccagcctttttcatcttcatagacttctgatttcaccggtacgggtactccagatatttgcgttgttttaattccacaaaatattttctttgttttataacaagttccattcacaaagtactccacgattggatacacccttccatttcccggaaacccatattgtttaacaataccgtctgtctgctttgtacacaattgattctgtctttttacaatgatattgaaagtaactcctagtaaaaccaatattacaccaagacctccaactgtcatcaattctaaccatgcaatttgtatttctgtcatagtttcatcacctcaaattccagttttcttgattctgcaaacttgaatttgtaattacattccatacatattggcattctttacaatcactctatctcctttttctaattgttccttagaaactcctcttaacccaagtccaacatgttctgttttatatccacaaccatttgattttcgttcttttgtatgtatatcgatgttagtaattatagtctctaatacacctccatttgttttataaacacacgcattttctccttctctacacattcctgttgatatgtttcctgtgacaactgttccaccccccataattgtaaatacatcatcaataatcaattcaaagtcttcttttaaacataatggaacatctaatctgttcatatactctttttctcgctcttttttgcttttaccaaataatcccatagtgtttctcctttataacttctaatttgttgctcaaatcatatcacattttcaaacatatctcaattccaattgtctctgcccccatctattgcattgcctttcggcttgcttctgtaaccagcatccggttaatcttttcttgcatggtttcctttgcatcttcattgaaatgatagcggacaacatatactgtctgcccgattttctttgtaaatgtgtttccctctgtttttttattcatcattttttccataatcatctatttcctttctttcctgtgcccgacagagagaggtttgcttctgtccctgccgggagtttatcggcacgctgacaacgcaagtgtcaacatagggtttgaaacttttttcgggtagttatttctgttttccaaaatactattgaaaagttttttgaatgttcttgttgacacctgttaaaaagtagctgaaacaccggtaaatacaaaggattttggtgtcaacaaaaatgtcaacaagcagtaaatttccgggtaatcagtagcctttcggcatcaaaatcagcctttctctctgtcgggcagatcaaatggcagctccaactgttctgctttcgtcagctttgtaaatccatctttatccggttcgttgccaccctcttcttctgctccttccctgatccagcttctctgtctgccatatccttcctttgaaaatctgtggactccggctctcttccagccagtgatctgcgtatccataatggaacagatctcatttgtctcgaattttttcggctcccggtcaaaatggtcaaaggcttctttccagatctggacggaacatacatgactacctttataagcgtccagccagccttgtatcattcctgccatcgtatcttcctgtgtgaactgttttcggtattcactgatctcctgctccatttcctttgagaacttcaacaggctgctcttattctccgttgaccagtagatttccattacttctgcccacaactggtcaaaataggatctggcttctttttcatcatcgaggatatgcttctctgccttactgctgtctatagcaatcggcaggaaccgtcttgccccggtacggtcaaaaggaatgaactgccttgtgttcgttgaacctgcaaagatacactgacgcttccggtcttcctcatatttatcataagggttccggtaagtgtctttctgtctggtcaggaatgacttgatttcctcattgctctttgcactgattgcagcaatcatctccgacatttccataatccagtgtccccggagatgctcgtatatcttactgtcattcaactgcttcagatcatcagaaaaccagtcatcgttcaatgcaagaaaacggaaaaatgtggattttccggctccctgctgacctaccagacaaagcatttcatctgctttacaaccggggcggtagattctgcttaatgcttccatcaggaagtgcttcacaacctcatagacaaaatccgaagcatctgcccccatataccgttgcagaacataacggattctctcctgcccgtcccactccagttgttccagatactcacagatcgggtggtatgcccggctgttggcttctatgcgaagtgccttatccatacatttttcacttgtgagtttgtaatagcgttcaaagaaatagtagaaataagtcctgccatcatcatccagcttgcagacttcctcattccaccagagtttttttacaatatcaatcctgcctgtcagcttgttgtatttcatactctcacgcacaagcggatcatttctcagcacaaccatataatttccaaccgttgctttcgcagttcctttctgtgtatattccagcatctgtttcacttcatcgactttgcttttatctaccatccggaacatttctttcatggcatctttctgttcttttgtggcgatctcctttatcttctctttcgcattgctcaatccgctccacctccttccatttttcttttacaagtgcttccttatctgccctgtccccaaagagcaggatatccagataatactcaacaactgacaactccctgagagcagtcataaacttttcatgccattcttctgtccgtgtttttggtgcatactgttctttccattccagaagcaggctcagataatccagataggctctcaggcatctcagatgttttttctgccaaagttcttctggtgtcggctctggcttttttgctgaaacgcttctcctgttctgcggtgatcccctgtccctgccggaataaggaatcccaaaatcatctgccagcttcatggctgcatctttcaatccaatgtcaaacagttgtgccgtaaaatcaatggcatctcctgtacagccacacccgaaacaataatatctccggtcaactttcatgctgggtgatttgtcattatggaaaatgcagcggatcagtccgctcctgttgggctttaacccatacctctccgcagcctgccggacggtcacattctgttttacttcatcaaataatcccaattcgtttcctctctttcttaaatctgcttcccaaatctgggaagcaagttttcacaaaaaacaaaaaagcactttgtcctgtccttacggaatcaacaaaatgcccttatagttccagatcactggaatgtgatcttcctttattcagttgttttctctctgcctcttctctttgaatctttgctacgttcaatgcaagtttttctctgattgacggcttcacttcttttttgatttcttctacaacggcttttttcttctctggctgttttaactgacggacaaccctcacaacagctttttccatcgcatattcgatttttttaatcagaccgtccagcctgtttatcgcatattccttttcttttcgtgatgccttacgttccggactctgaatccatctcttagaatcttccgcaagacgaatgtcatcttttctggtagcccgcattgtttcctctgcgactttatccacagccttgtcataggcttcactggatacttcgtcaagcaaggtttccacatcttcaatacggagggtaagctgttgcagttcctctctctgttcttcaatcagctcgccctgacttagaatccggtcagaattggaaatgaaattttctttaaattctttttcctgctgttctattttttctttctgtgactggataaccttttcatttgccctgacatggtttgactgccttgcaagttccagatgattcgcattgaccttatccctctgctgattgagcatttcctgctgaaccgcaatctcttctttctgcttcattcggatatagtcctgtttctccagatactgccttcctccataggacggttcttcgtcaatttccagtccatgacgtttacagatatccaggaacattgtccggcaggcagaatcaaaaacaaccttacggttatttgtctttgatcttttcttttccggattcggaagttcaaagccaagttcttccagtgccgcttcctgtttcggttcaatctccccataccggttcgtagcatcgaatacatgacgctcatgaatatgcggagtcgcttcgtccatgtgcagtgaccagtcaatgatatgcacattagaaccaaaccgctcatcgaactctttcttgaattcatcaaaaaccaaaaccagcgtttccacagaagcgtgttcatctatcgtcccaagctgatagatactttcttccggacaggtctttttatttttcagaacatcttccacccctttacatctgtcggggtgtcttgctttctcatgacgtttattctggttaatcacataatcgctgtaatgatccacatagtatgccatctcaatctggttaaaagaaaaattatcctcttttccccggtctgccattgtggtatatccctgatagcagtcccagtaaatattctgacggacacgttcattgtcaatatgctcactgtgttccgggtcaaatctccggtcattgtgaagcggattgtaaacaccgtctttcccagatctgccgttatgccttgtgcctttcaattcacatctctccttttttcaagttgtttccccggaggggattgcagcgaagcttccaaaagtctctgtccccgttacagacagtacccagtaccatatggcgaaacgccatatcactgggcaatggctgccgcccttaacctgctaagggctttgccccttaaccccagcaagatgctgccgctctttgcaatctgggcacaaaggacttccagccctctgtactcccagcagacaaaacgtaactcctgccgctgtcccttcagcaggatctccgttccgtctgtttttcaaaaatcctctgcatcggattttgtgaaaatataaaaatgggtaaaacaagggcactaactttttacggttaatgccctttcctttactcattcacttttcagataattcctgtatgtatcattctgataattgcttcagaaccattttaacattcttcctaagtttcattccgtccctcagtcccaaccggtagaaaaattcttctgtctctgctccactgttaaatatctggtcgcaatattttgtaatggcctcttcctgtttctgtggaagtgtggcaatcacttttttatattcttcctcaacttcatctggttctgtcacagacggctggctcagtttccagtctgcatactcttttcccatatgctccgttatggtcaggttgataaattcttcaatctcttttgtaatcttcatttaagaatcctattcctttctccagtggtctacttcatcaatctgattttgattgtttccagccacaccactgcccagccagaaagcacagcaggatataaagtataaaacctgccacaagcatcctgaccgcttctgtgcctgtctcctgtccgaatccataccctaaaactgctgtaatgcagatgatccccgacaggatatgaaataccgttgccgacagccatgtgaagaacataaccaccagttgtatcattgtcaggcatatacgcactggcagtaatacgattttcacaataattcttacaacaaccatgactgtccacccctttcactgtttcagataactacgatagctgtctatcacagaatctgtcacaccgcttttgtaaatctttcggatatcaacgattttttcatctttcaaaagtttcagccagtccagtaaatcttttctgctgtttgcaaaattacaacatcttccgtctgcatattcaatccagtatctcataagtccctcctacacatacaccagttcatttaaaataatttcatctacccggcttcttgcattgtttgcccggcgaacccattccatctgatctctgcttttcaattcttccgtaatgccttcctgctccataatctgttccatgaggaaatccctgcgttccaaacactgctcattcagatctgcgagatacgtccagagcttaccactcaatgtcagataggaatacaagccactcttgtaatctttcagatagtttctgtgaagacttccataaaaaccaatctctcttttctcttcgggtactgcgatcagtggcagatagatttccccgacaaggatataatccagaccattactgttatcgtgaatgattctttctaatttgctcatgctgatgcaactcctttcttcggttctgctgggggaagcagtgatagcggaatgaacacaccttttgcaatatcttcctgccggatctcttctttttttgcatccagttcggctttcttttttgcctttgtccgttcatagtattcctgctgctttccatttgcttttcttctcaggtaattctggtgaagcctgtcttttctggcttcccgtttttccatttcttcaatttcttccggtgtcattttcacctcaccgaaatgtggcggtaaatatctgccgatgaagttaaaatagatttccacttcctgtgtcgtctcaacgcttcctttccggtcacgctcatgcaccacaatcttttctacaaattcattcagcatgtaagtggtcaattcctcaaaattttggtatttatcaaccagagcaataaacttctccgctgatctgcgaccttcttcatagcctgataattcagcttccatatctgcaatttctgccgacaaatctttctgttctttagaatactgtccatcaagaatcgcatagcgttcatctggcagcttgccaagaatattgtcctcataaattctgcagatcagtttttccagttcctgcacacgcttttttgcctctgccaatctgcttttcaatcttgtgatctcactggactgctgtgaagtctgtgccttttttactgtctccaaaaattcttcacgattcaactgtgaatactccgcaacagcctttaaaagttccttaatcagctccataaccacatcagcattaattctgtgctgtgtctggcagagtgttccaaccggaactttagaatatgcagaacaagtatattgtggtactcgcttgccattatttactcgatggacatacattttggaaccacagtctgcacaatacatcagacctgtcaaggggtgggcttctccccatccatctggatatcttctcacattgcttcggattctctgtacattgtcaaaagtttcctgatctataatggcttcctgcgtgttctcaaacaccgtccaattatcttcagatacgtaatggcttttcttatccttgaaatgttttctggtcttgaagttcactgtatgaccaagatactctcttttcttcagaatgcctgcaacagtagaagagccccagccataaggatctttgatttcttctactctgcctttccataatccggcatctttctttgccatatgaaccgctggtatctcaaccttatcctctttcagtgccttggcaatctgatatggtccgtacccatccattgtcatgtgaaagattctccgtacaactacagctgcttcttcatcaacaatccatacattcgggtcatccttgtctttcagatacccatatggtgttgtacttgccacatgcttgccggattttcctttcgccttgaaagtggattttatctttttactggtatcccttgcataccattcattcatgatatttcggaatggagtaaaatcatcgtcctcccggaagctgtctacattctcgttgactgcaatcaggcggacattcttctgtcgcagcaattccatatattgtccgactttcagataatctcttcccattcggctcatatctttaatcagaatcgttccgactttccccgactctacttctttcatcatggcaagaaagcctgggcgatcaaatcttgtaccggaaataccatcatcagtaaaatgaacaagattggtaaatccatgttcttttgcatattgttccagcagtttcttctggtttgaaatactgttggattccccgtttaattcatcatcacgactaagacgttcatacaacgctgtcatgaatccctgtttctctgtcatagtcagatgtcctccttcctttgtttattaattgcctgttctcatcccatatccgttcctgtaccgggttctgatgtttccgggacgtattaaccaaaaaagacacgctgaatgcctattcagttctggtatcactacgggcaggctgtttcgttttcaaggttcgtgtaagaagtaaaaaagattcttacactaaacgaaatgctcagaggtctttttacagcccccttactgcatcttttttgatttcgtgtcatctttttaaagttccttacacaatctctgtactgacgaaacaaaatacggacatgttttgaaattgttttttacaaaatacaattttgttctttaaggtaaaaaaataagcctcaagagactttttaatcattttggagctccaactctttaaatttgattaattaagaagtctcttcaaacttactacaccagccgccattttgtattttttatactgtctgactgcaaagtgctgcggatctctttcttccagttcctggaacatcatatccactggattctggtaagtttcatcctcttcacgggtttcgctttcattcaaaagatccagaagggtattcagattcttttcctcttcatctccttcataccagataaaagcaatcaatgccgtgtacaacagcttctctgctttcacccaaaaatcttcggaagctttttccccttcgcctttggtattaacaataattgttgtaaccagcttcaggatatctttttcagaccgtatataagcaaatggattgtaatgaagcgatttggaaaagttgatagtattcagaaccttaatcacatatggttcgtgtaccacttttcctgatttatctttcataatatttccattcttatctttcttaggtggtccctttgctaacatcttcccgcactcctcgatcagagtgcctttcggatctgaaatgaccatggaacagttcatctgcatgactgacggcttaacgaaaaatcgagtttttccggaaccactgccgccaatgaccactatatttttatttcttgcatactttggctgtttaggtctactttccatagtcaatgcttctgttgctgtcaatggaatattcatccagggatcttccgacatataaggcttgatatcctctgcggttccccatctggctgaaccatactcgatgcctttccgtaatttctttgcgtctgcctgtttctgccagaccaacactttcagaacggctgcaacaacaatacctgccagcagatctttccagttattgcttaacacaaaaccagcaaaaatccggtctgcgtgttccattgcatataatagtttgttccccatatcttctcccggactgttccggtaaagaaaaaatgcccggtctgcatagaaagcagccagagcataaggaatatttgtaagaaccattttctttttatccagggcggacagcttacccccgattttattcttccacttctgcatcagagttttgccgcttttctttttcatcgactctgctcctgatgccggttctttactttgtccttcgtcttctttggcatcattgcccggtaagctgcaagacgcttatgaatggaaggtttattcgctttttgaatctgtttctgggaaaactcacggaaagcagcattgagtgcatcctgatcacgtcccttgaagaataccagataaaccggaggctctttgctcttgtcttttttcagagcataattgatcccgtattttctggcataccgttcaaaggacttgatatttttgtccgtgatctcgatattgaccatcccggcattctgttttgccagctcttttaccgtgacctttccctgtttcggctgatttttctgtgctttcttctctactgatttctgcctctgatgacgcagatacgcaacaagaacctttttcaacaggtctgccgtaatcttagtagcccgaatacagaacgtgaccgttttctgagttacctcttcctgcatgacttttccctcctttcagcgattcaactgctgtccagatctgtaatcatggcaatcaccccctttaataaaaaaagacagattaaccggtaatcaggttctgcacctgtacgagtttttctgtcccttcttcttttctcttatcttctccaccacaatagatgggaacacacatttcaagtattctactgtaaatacgctgatgggcagtatccaaatctgtggatttcatttcattcagtcccagattcgttgttatgatcagcggaagcattttacaatagcggctgtctatcacattatagacctgctccaaagcaaactcggaatttcgttctattcccaagtcatcaataatcagcaacggataatccacaagattttgtataatctggttcttatctgcctgatagctggtcatttcatttaagatcctagaaaaatttgtcatcatgacacgttctccctgttccaaaagtgcatttgcaatacagcctgcaaagaaacttttcccggttccaactggtcccatcaaaagcaatcctacattttttctcttcatatctgtccagttttctacatactgcctggcgattagtatcttctggttgcttccattgtcattttcgaatttccattcccagaatcttctttcccgaagtccgacggattttctctgataaagctgcctctgtgcttcttcccactgcatcttctcatccagttcctgcctggcttttacctcgcattcgcacaaacaggacactacatgctcaaatcccatcagactgactttcatctgttttctttttccacaggtgccacaatgaagacacccatcttcgtccagataatctgctgttactttgttttccatcacaggctttctccttcctgaaattcatatttatccattcctatcctggttccatccctttctgcccaaagacagattgttgcaaaatggttctgatactcttttccactggatttcatataaacagaaagatgatcaatccgtttctggtaatcccatggaaatagcgtcatcaactcctgcagttcagcttccgacagaacaacatttttaaatctaccatactgactgaatttttcttccaaagcgggtgtattgctcttactcttatcagtatgattcttttcagtcttatttatcttagtattacttccatccagattcttgcagtccggacttctatttttttgcgttccggacttccagtttcttgcaatccggatttccaattctttgcagtctggatttccagtttctggcgttccagaagaaaagtatcttaccggctttcctctactccgttttacaaaatttttcacatatatgacagagggacgattattcccctgccgatatcgctcgatcaatccaatcccatgcacactatccagctcatataaaagctttgtcactgtcgtatgcgacattcgcaacagctcctgcaattctgcgatcgtgtaaatgatatagacataacccccactgtcaatccagccatttttcttggacaggctgattcgatcaagcagaattccataaaggagctttgcgtctgtggacaggcttgcaaactctttttctgtgaacagagcttttggtatccgaaaaaaagaaaactggtcagattcttctgctctgaaatattcaaaatctgccataatattttcctactcttctacatcaaaatcacaatttgctgcactgcctgtaccatggcacatctcatcaaatacaaaattgaatgattgaatcatttcgtccaaataataatttctggccttcttgttacaagcatacatatcaccaataaagccttcatcattccccatcgcatgaacaagggtttccaggaccttcataaacttcttttttgaacagctttcatactgtctgttcacatatttctggatatctaacacacgagcaggattattttcattttcctccagaattccaaatgcaagatccatgccaaactcatatccatcagcctgaatttgatcaatatccatctctccaagttcatcctggtatcctcgcttttccattgcagttaaagacgtttcatattgatcaatatatcccatatccgcaatagtttcaaaaatatctctggatgctttcaccatcttatccataataatttctctttcagccagcggcatatttgccatgatagtatctaatgtcatcattgattcttcctccatctcattttcataaatatcattgatataaaagtggttcgcctttccattgtttggaatgatacgcaccagattaccaacctgaaccagttcctgtactgcctgatctactccatatctagtcgtattcaggtctttcttcatttcacttttgggatagataacatacagatctccgttatgatctacccaaccattctgcaccgcaaatttcaaacgatccagaaataagctgtataaaatctttgctgtatttgacagatttttgtattttgccatctgaaacagcaccttcggcacctgcagacactctaccggcatatactccatcttactcattcattgttttctccttctgtttgtacagcacttcggctgaattaatattaatttccagcatccctacaaatacctgatagtacagcaggcatatctgttcatcctctcttgccagatacaatccttccagttcattggacggatgtttcattccgtatactgcctgacagatatcatggattttctcacattccacacttctaagatgcagctccaaggtgtggttaaatctctgccagtcctccagtttctgatttactgacatcatgcaccggaacaattccgctgcttcacatgctgctgacagcactacatttttgttattgatacttccatcggcatttttcatatgccctaccatatacgcctgatctactgaaaccatcttttatcctcctctatctaaacggcatttcctcttccatgccctctgggatttctaagaacccttccgcatcttctggaaatggtggtctgtcaaccattttcgcacctgcgaattcaatccggtttgcatacacttcggtggtatagatctttttcccggtatccttatcttcataattacctgtgacaatctcgccttccaccatgaccttcgttccctgcatcagataatctctggcaaattctgctttctttgcaaaagcctttaccggaatgaaactgacttcatcggaataatttcttcttactgccagaacaaacttggcaatcttatgaagtcccttttcgttctccacttcgttgtatccgggatttcttaccaatcgcccggaaataactgttgtattcattggcttacccctcctatgctttcattgatttgtaacagataccgatacatggtccacattttccataggcacatccgtaacattcatctttttccaactcttcttgcttcatttcatcggcaaacattcctaacagtgttgtgtaaatctttttcattgccaggaacttttcttctgctttttccatcttctctttgtaaaatgggatcagttcacgaagaactggatggaaacgttcattttcatcattccaggcacaggttttcatcatacagcgtggctgtttctcataattgcccagataatacgggcagaaggtacagcctctttctttaacaatttccaccggaatcactggcatctgacttttgatttcctttgttacatgcttactttcaattcgctctctcatcttaaaaatcctccaagaatatttatttgcaaaagggacttcccctgaattgcctgtttttaagcacaaaaaaagaggcagacttacgatttttgttttcgcaagcctgcctcttatcaatctaatattctattttccaatgacataccgtataaacacgtatatcgctctgatcacatacactggaatcatgatacttccaatcaatgctccaataatgacacttaatgcagccatcccaagtgttgctggggtatccattcctctcggaatcagaatcaaccgcattttatgtattccaaatggaagtccggaaagaaatatccaccagaacaagtctgtctgtccactgactttcatgatggtggataccatccagaaccagaatagcataaatgccagtggcaatattgattttttaattacgtcttcaatcgtcaccttttttctccctctctctgattccttccgccacctcccgattaagatttgccaatatttttctaaccacaggagaatccaatcgaaaggtttccatatctttctcagtaagctcccttccgttcgcatcatatcttcgtacaatctttaaagccatactttcacttccttcctgttgataatcctaatgttttcaacaaatgtttaaacttctctcttttcatccgtttaacacgtatcttttctatcttcttcagataaacttgtattctacttgccgtatcttcattgctcattctttcccctctctttctgcccacgatgccagaagcataaatataatttcttccatctgatcctttgtatatgtctctggaaaatattgtttcaatttcttcgccggaatctgcacctgaactttttcagtactttcattcatgcaaatctggtcaatctctgaatacgtcaacatctgctcttttgaaatctgcttcaattcctttgcctgcttcatggacggtaccatattgtgattactcatatactgaaataatatctgctgctcttcagttctcaaataagaaagttcaacagctgtgttaaagggaagcttcttctcgtctgccaattctaatagctctgctactaactctgtcagatgaatatatcgaagaatctgtctggaactatctcctgtattctgactgacttcttctgccgccaacttcttgccaacttggcaagaagttaaatcagatcgttttccctgacgctttaacgcctcatatttcattttataagcaaatgccttttcgctgatcagcagctcttctcgttgaatgttggaatctaccataatcaccgtcgcttcatcatctgtaagatctttgatgataaccggcattttctctagtccagaaagttcacatgctcgttttcgccgatgaccagctaccagctcataaccaccggactctctcaaccgcacaataccaggaaccaacacgccatattgtgtaatgctttcagacaattcctccattttcttatcatcttttacttgaaatgggtgatttggaaacggatgaaggcttcctattgctatctcactgattccattggttgtctcttcgcttgttccaaacaacgcatcaagcggctgtaaggaaatgggtgttgctctttttttagatggcatctttcagcacctcctccgtcactctccgataagcttctgtagctttgcctttcggatcataagagaaaatactctgtccttctctgactgcctccttcattcttacggaaaatggaatataattatcaaagatattaatttgacttccatatacatttctgagaagttccatattatttcttgcatcattcgtatgagcatctaccatcgtgaacagaatcccaccgacttgcagcttcggattaatctgcttacggaccttaccgatcgtttttaataactgttgcaatcctttgattggcaggtaggacgcttcaaccggaataagtacttcatctgatgcagccagcgcattgatcgtaatcattcccaatgatggcatacaatcaatgatgaccgcatcatattgatctttgataccatataatatctgtttcaatacatattccctgctcattgcatttaccaactgtacttctgtacctgccagtccaatgttagaacagataatgtctattccctctgcctgatgtctgatataatagtcggaaggaatatcttcatctttcattactgcatccataagagctgtaagtgtttcattactgtcatcacaatcacgatatccaaatcctgcggatacatcagactgtggatctgcatctacaatcaacactttcatattcttttgtgccaatcctactgctaaattagctgtacatgcggattttcccgttccccctttttggtttacaatagaaataattctagccattttttcaacacctttcaatcaataaaaatgaccgaatcagctaaacagattttcatccattacgagctaattcggtcctgtttttcgctattaaattgtaatatcaccactttcgtgatacagtaaaagcatctcagataaaagcggaaattttctttcatctgaataagttttttataaaagctaggcctttccttcataatttgttgattcgttgcaagtttttttcaggaccaaaccgactcaaccccttgtatttactgggtttccgttgatttagtcttattttatcatcatcatcgccggagcggattccgcaccagtaaagcatttcaaaggcataataggaacggggcttatccatcatggcttcggagaatttcagatattcctctttcgtccagaagtccatttctttcggaacctcatttcccattgtgccggcccgccttgccggattgtagggcaggttatagaagttcacagcatggttgaaaattgctgtaagctgggcgtgtatggttttcagataatccgccgaataaggcttccctttctcgtcccggtacgccatgagttcattctgccatgcgataatgtcttttgcttcaatctccgctatcttccgatttccgaaatacggtaaaatctttgtgcggattacatggcttttggattcccatgtgctttccttgacacgctgtttcttgtcggcttcgtaaacctcaaagaagctggcaaatgtcatatccagctttgcaccttgtttcagcatggcttcatgttcccacgcctgtgcttccctcttcgtagcaaatcctcgtttctgggtctgcttccgctcccctttccaattcgtgaaacgatagattacccgccacgttcctgtagcattgtctttgtatacagccattcaaatcatctcctttccgcttaatcgctgtaacagacctttttatgaaaaaatgtagcgttcacacgaccagccaccgtcagatagccctgtttctgtaattctgcgtttagttcccgcacaatctggtaggcttttgactttgacacccgcagttccgctgccacttcctccacagtcataaatgatttttctgccattcagttatcctctcctttctttatttaactgtttttgtttaagttatatccatgatactaaataaattccgttaagtcaagtggtttgcagaaaaatcttaactttttttatttaagttcctcttgctattcctattgcacaatgttatactaacttcaacagaaatgtttaagtcaagaatggttgtatcactataactacaacggaggttttattatggcaatcggcaaacgaatccgctttttccgtaatcggaaaggcatgacgcaaaagcagttaggcgaaatcctcggttttctcggaaagacctctgatgtccgtatggcacagtatgaatcagaagccagaacgccgaagcaagaccttgtaaaagaaatggcaaatatctttgatgtcagcccacgagcaatcacagtcccggagattgacagctatatcgggcttatgcacacactttttgcgctggaagatatgtatggactgaaaatcggagagattgacggggaagtgtgtctgcggctggacaagtccgactgttccacctattcctccatgttcaaaatgttccacgcatggcaggaacaatctgccaagctggaacggggcgagattagcagagaagaatacgaccagtggcgatacaagtacccagaacttgacacctctggacattgggggagtgttccctcgcaggcggtcagtgatatgcttgccaaagaatttcaggaaatcgagaaagaagaaaagaaagcgtctaaaaagaaaaagcagaaataagcataaaaagaccttgccgatgttcagtttccatatctgaaaatcagcaaggtttttctgttattgaagtattctgttattcagtgagtgatacccaaaatgttgccaaatcgttgccagcgcttaaacaaatttgtttgaaacgcgcataaataaaggctttttcaagtccatttcatcactcaaactccagacagacagtacggagtattaacgcatatagacgattttaaaggctttttaaccagttaagagcaacatagccacataatctaaattttaaaaatgcaataaaaatgcaatgagtgacacgactacttgctatacttccatcggcttcttcttgataccaacactatgaaaagtccgattacaattaaatatactttgaaaggaagatcaccatgaattacaaattagaactcaaacaaatcgtggaatttccacgctgtcgcatttaccgtgacttcatacaaactttaatcactaccaagagcatccgaactaccgggggctcttttcttttttattatctggtattatgctcctatgcaaattaccgcacatcctaccgccggatggaacacattacctataccattggtccaggagagtggatctgcacagtcacagatcttcaggaatggtttcgctgccgtttccaacatcaagcgttgtccatccttcgattttttgaagagcagaattacattacctactctcttctcggcaaaaaccgcctggtcaaattcaaaatatcagactggtccaaagacaataccgtattggaatacaactatccctgtaaaaaagatacagggtttttctttttcccgattgccaaagttcacgaactaattggcattggaaaatgctcggaaatggatgttattctggatctgtggattcatgcagtttacaacgattcctctgtcctgggatctgattccggtcccattgtctattaccgggataataccggaaatccccttaccagctttaatgaactgggtgaaaggtggagtctgtcaaaggcatcggtatcacgactcttgaagaaactggaggaaaaagaatacattacacttatctcatttacaggaaaacacggaagcgtaatttatctcaacaattacctgtccgtgatgtttaatatcagcgacgttatgattgacaaggaggagatcgctatgaagatgcaattaccaatccatgtacctgaagaaatcactattgaggattctgcttctgttagcgtttcagaaactgtcacagactcacaaatcaccgttacaaaaaatgattcctgcgttccagattcacacatgaaatttatcgtgcaaaaagtcgcagaactattggattcacaagggattccatgttgccactgctccaaaacccgctatatattatctccattatcagcctgcaaagatatatttaatacatttactctaaatattatctgtccctacggaaatgccgcttatcggtttgagttgtccgtaagtccaggggatgagtctgcccaaaagatgcctgccgtggcagagccttcttcactgaaagggggggaatagacatggcaaaccgcaatacacagggatttccttcacccgaagaagatccacgttttcacgacacctatcagtttttacgcagataccgggatgcaacctacagcctgaaggtagtcgtacaccagatggagcaccagtttaagctccaatacgacaatgacatcgacaaatttctggactccatctatgctgccggggctgatcttaccggaagcgacatcgaacaacgggcaaaaagtattgccagaagcaaccagatgctgaagcttttggaatcatccatcgatctcctccggaacaatcacaagcatggggaacagtattactggattctctactacgcttttctctctccacaggaaatgaaaaatacagatgagatattggataagctggctcaccacatcaccaatatttcctaccgcacctattaccggaaacgcagggctgcgattgaagcactcagtaccatcctttggggatttactgcaaaagagacattggatacgctcaacaagttctttccagagtaatacatatcgcctatctcctcggcttttcgtaatatcataaaaatgttatactaaaaaatgcaaaatatatattgactctcacggaacgtcatagcgtacagttatcttatcaggaacaggaggtcagcaactatgaggacagtcaaagaaatatcagaacttacaggtatcagcgttcgcacgcttcactattacgatgaaatcgggcttttaaaaccaacacaaaaaagtgatgcgggataccggctttatgacgatagggcattggaaatattacagcagattctgtttttccgtgagtttgacattcctttgaaagaaatcaaagctgttctggagaatcctgctcttgaaaggaaccagatcttgcaaatgcagagaaaaatgttggtagcaaagaaagaacgtatggaacatctgattgccagcattgatgatatcctgaaaggagagaataaaatggattttgcgatttttagtaaaacggaagttgaagaaatgttccaaactatgtttgaacatatgcctgacaatatgaaagaacttgctgtaaaagagtttggaagcattgaagaatggaaaaagcattatattaagacagtttcatcagaagaaatgcagaaaggctatgctaaagttgttgagtggtatggaggaaaagagcaattcctgtctgttgccaacaatcctattagcaaagaggctgcagaaagttacaaccaacaatttgacaatcttttatacaaattagcagctaaaaaagtatgttcaccagattcttctgaagtaagagaacttgtttccgaatacggttttcttatgaaacaactttcacagataaagaaagaacacggtctgatggttgcacaggctcaatattaccgtaatgaaaaaatcaaacctatgatagatgaaaaatacggcaatggtacagccgaattcttcgcacaagctttcgaagcattttataaagacaagtaatcattagaactacacaaaagcacaacaatacaccatgcagggaatcaaaatggtttcctgcttttttatgccaaccagtgaaaatggcacagaaatgacctgcttctgcgattgaagcgtaaaattacccatgctacaataggtattgcttatagttttccttatttccagcacccatagatggcgctttttttgtacctgtaaattcaatcgctgacagcaggttctatgtactttgtacgtacactatacttacaataccaaacgtatcctgtacgtacagccatatgtataaagtttcctattatatatagaagggagtcaatcatgaaaacaaggaacgaaatctatcaaggagagggagccaagctcttacggttcattaccacttaccatactctgaggtatgaccaggttttacaacttttctcccgacatgagcagtctatcaagtcattgattaccagcctcatcaaacaagggcgcatcatttacgataaagagcatgaccttctttgtgacagccagcagtctgctgagaatcctgactatgctataattacatgcttctgggtactgctggattttaagaaaggtgttgtataccacaccagtggcgaatttccaatcaagctcaatttcttttcgcaagatgaacaatacgaaatcatctatatcggtgaagaacaggaggctctgatcaatcatgtgatggaaagtatcccatcacatggttccaaacgcctgattgtcttagaatccgaaagccaggctgccaaaatcaccattgatgatgtagccgcttactgccttgtaaatgaatccggtgctgtcagttactacatgagaaagtaggttattatgacgcaaaatacaccaaccatttaccagcggcttgaaaaactggaaggggagctgcaaaaactgacgaataccgtttacgctctgaaggtcactgatatccagaattatgataaaaattttgaggaactgagcgtcagtgctgctcttcgggcggagcggattgcctgccagatgcgtaaccttgtctgtccggctctctccccaaatcaagcagcttatcttcccaaagcggcagatgcacagggaatgcggattgcagaacagcaggggattctcaccattacgcttcccggactgcttccgaaacgaagagtccacacaaacactgcatttctccatgaaccgcttaattatatgcttcgggagtatgtaaaacaaaatgccctgcccctctatcgtgactgcgtgatatgtttcagtcaaatatatgacagggaacttcctcaaagacgtatccgggattatgacaatctggagtttaaacagattctggatacactttgtacttatgttctgacagatgacagcggctttttctgtgattcctactacacgacacagcttggcttaaaggactgtacactggtatcggttatggaaaaagctgactttccgaaatggctgcagaaccagaaaaatcatcacgaaagcatgtcggaaaatctcctgacttctcaggcagaaatccgacatcggtaagaaccaccgcagggaactttgttttcttgctttttttatctccaaaccaccggagatttacccaagtataggcttgcatgggtaagaactgaattgaggtgatgcttatttgataagacctgacactacgaaataccgcttactggaaatgatagggatgtgcggggaatttcccgcagaccagctaaacagactcatcccaagtgcctcctatgcggaaaaactcattacggatttgaaggcggaacacctcatccgtacccactaccgggatgctctcagaggctaccgtcttacaaaagctgcgaaagagatgctgttatctgtctcgccgctacgcttccagtgctatctgaccggcaataccgagacgaacctcatccgaagtgaagtatcccgacgtatccgcttacatcagaaagccgaaacgtatctgacactccttcatgccgggattcccttttatccggatgtaaaacctgacatcttctgtaatcaccgcgaagctggttccatcggtatgcgaagccttcctcttttttacgcttccagagaaattaaggaattgggcccggagaccacgaagattaggaactcccgcagcatgggcatcctgatggcaccgcaatgtgtctatgtcctttataacacgggaaacggagtcctgaaatgggaatatcgaacggaagtccgcttaaacgccttcctgcagcattacctgcaaggctacccttacaacggacatccacagatccgggcaatcatgaccggaaccgacatggaaatggctttccggctgtttaccagtaccggaggctacaaaaagagcctgtttatgctggacacctccttcgagcatttccattaccttcccaatactccggaaggggaagtgcttttaaaactgctggttcaccctgagatcatggaaaagctggacaacctcctgctgtccgatctgggctgccgcagcgattcaattccactggaacatgatgccacggatgcttccgggaaccccatccttcttgcttatgattttgacatgcagcgaatcaaccggttcaataccggcttaaatgtatacggcagatccgggaacctgatctgtttcgattttcagattccggtcctgaaaaaatacttaactgccacaatccatttctccagtattgacctttgcaaattcaaaagggggtttttacatgaaccgtaaatggtggaagctcatttatatgcttccgatcaccttctgcaccctctatgcaggaggctatgttgctcaatttatccgcaactatcagacctgggaatctgccggcaattttgccggaaacggaactgccccgcagatcccctccccgcacccgctcgcctgtctggatgccctgactgctttcccgtacaatctgtatgggatttttctatgtctggcagcttttggactcctgaccttccttctcatgcgtatgggatttgaccgaaacggggaaataacagaccggggccggaacctgaattattccacaaagggaacctatgggacttccggttttatgactttggaggaaatgcatcaggtactggagcttacgaatgatgtcaagaaacacaagggaaccattcttggaaaactgaacggaaaagccgtttgtctcccgaaggatacccgcatgaaccggaatattgccgtttacggtgccagcggttccatgaaaagccgggcctttgcacgcaacatgatcttccagtgtgttgcccgcggggaaagcctcatcatcaccgatccaaaatcggaattgtacgaaagtacagccacttaccttgagaatgccggatatatcgtgaaatcctttaatcttgtaaacccggaaaactcggatagttggaattgtctgggtgaaattggcggacaggaaaccatggcacaggtatttgctgatgtcatcatccagaataccggttctgccaaaggcgatcacttctgggacaatgccgagatgaacttattaaaagctctgattctctatgtggatcagggattcccaccggaggcaaagaatatcggacaggtatacaaactcctgaccatgagttcggaaaaagaactgaacagcctctttgacctgcttccggtctcccatccggcaaaagtcccctactgcatctataagcaggcaagtgacacggtacgttccggcgtcatcatcggactcggttccagacttcaggtattccagaacaagctgatccgccagatcacttcctatgatgagatcaacctgacgctgccgggaaaagaaaaatgtgcatacttctgcatcacttcggatcaagacagcacttttgattttctttcttccctgtttatgaccttcgtatttatcaaactggtccgttatgcagacacctatggggaagatggaaaactgccggttccggtacatatcctggctgatgagctggcgaatacgggagcaatcctatcgctcaacaaaaagatttccgtgatccgaagtcgaaacctcagtatttcctgcattttccaaaacctgcctcagatgcagaaccggtatcccttaaaccaatggcaggaaatcatcgggaactgcgacactcagctatttttaggctgtacggatgaggtaactgctacatttatctctaaccgctccggtgatgtgaccgttggtgtcagcagcgaagccaaacaattaaatagctggagggtatccgattatacaccggaataccgccagaccagatccatcgggaaacgaaagctcttaactccggatgagatcctgcggctcccgctggatactgcactgattatcctgcgtggtcagaaggtactgcaggtagaaaaatacgattacaccctgcacccggatgcccaaaaactcattccccggaaggcttccgaacatattccggaatggagaaaaggagcatgtagtgaagaatatacgtacactccaactattcctgcttcccacccgaaaaaaaccgcttcttatggaaagcagaaaaagaaaaaagctgaaccgcactttgaccagcaaagcgtttatcaggaacctggctatcacgatttcccggatgacttctcagcagataactattcggatcacacagacatggttcctttagataaagattctatcatgtcataatttgaaaggagacactatgatgccaaacgaaacaaccaacacacctattttaactctggattccgatgcgaagctggaaacagcccagtccatttcagaccttacctggcatgagatccagaatgcctaccgtacccgccggatcttaaccggaatgcttggcggtatcgagaaaacagaaaacggcagcctcattgccgtggtttactacaaggatttccgtactgtcatcccagtaactgagatgatgatccatctcatgcaggatgaagcacacgattatggggagcttgctctgcggcagaacaaaatcctcaacaatatgcttggatgtgagattgattttctgattaagggattagatccgaagacacgcagcattgtcgccagccggaaagaagcgatgctgaagaaacgccagatcttctatctggataaagatgcttccggaatgccgaaagtttatgaagaccgtatcgtgcaggcaagagtcattgctgttgcggaaaaggtagtccgggcagaaattttcggtgtggaaacctccattcttgccagagacctgtccttcgactggatgggtgatgccagagaacgcttccaggtaggcgatcacatcctggtacgcatcctggatgtgcgggcagactcaccggagcaggtcattgtccacgcagatgtcaaaagtgtggaaggcaacaccagcaaggaaaacatgaaaaaatgtaagattcagggaaaatacgccggaactgtggaagacatccataaaggcaccgtctttgtccggctctccatcggtgtcaatgccattgcccactcctgctatgacagccggacagtcgggaaaaaggatcaggtatcctttgtggtgacgcatattgatgaagagcgtaatgttgccctcggcatcatcacccgcatcatcaagcagaccatataaggcttccaccttatttttaaatagctttttttcatatacagcaccaattagtccagcaaatactcacgatacagctacataaggtgacagaataaagtatttttcagaccattaccttattgtactgaaaacggtaacgtgttatactgattcggtattactgaaccggaaagacggatgcatttcgattttgccctctagtatccaaggagggtgatgcccatgaatacaatggaagtattgactttactattggtaatttttgcggctttgacttatatagatcgacataataagaaatagcatccacgaccctaggaaagttttggatgctatgacttatacatagaatataaaatttaactgagggcatcagattttgcatctgaatacctttcttgagttcattatacactgggggatttgagaaatcaagtccccctttttattatgacattgattagtatctgcattaaacatcagaaatttatattcttactcactgaaacgaattctctctatcaatgaatctttccttactgactttgcaatgaatattgccaataacatctgtatcacaaacaatgttaaaattataataatagctgctgttaccggataatggtatgtgctgatatcaaacattcctgtacgctttgcatataaaaacaacggatatcctgcaagacttcccactccgatactgataataagagtgcctactgtatagaatataccttccaactggagcatcttcatcaactgacggtccgacattccgattgcctgcatcatgccaagctccttttttcgcacatggacactattgatcattgtgttaatcaagttcataatgctgattgctgccagaatgatgataaatgcataacatgcacctctagtcatctgtatggcattttcccatgtatcgtactcattcttccaggtacgcatctgcagtctgcctgatccatccacaatagcctgtagagatgcttccagtgcctcatcataatccttatctgcaatcacctgaaaatagctggaagaattatttatggtaagtttctctgccccttcttttgccatgataagacagttatagtttgtcagacctgttccatattcaccaattgctgccacttcaatctctttttgaaaggtattatctccatcatgaatattgagtttcagcttatctcccactttaatatctggataccagtgaagtagcgcgcggtccagaatcactttatccccggatttcaattcctcgtatgtgacattgccttcagtgattccttttttcagctcttctgcgtattcttccggcactccattgataaattcggttccaattttttcttcaaaaggtcctcctgataccttcaacgcggtaaacacatctacccgctcaacaccgtcaagctcctctatctgctgctttagtccttcatttaatggattattcttttgaacctccgcccattcatattcaggatgctctttattcccggattccacaattggagaaatctcatattgccccacaatcgaactctttgcactttccatcggatttgcacaagacagcaccgttgctaccatcatgacaaatattccggtaacggccatagatacaatcgtgatagtactcttctttttattctctgcaagatttctcttggtcagtcgtccgatattcagaaattgatatcccttcctgctgcttttctgtcgcttactgcctccctggtaacgcatagcttctatttctgataccttcgccgccatacgcataggcttcatcagtgacagatacactgtacacagagtcactgcaattgccaacagataaatccaccaataataaagttggacttctcctttagctacaaccttgtatgcctctgttataagtacgtttgaatcctttgcatgttctacaaactggagaagtacaactttcacagcaactgttccgatcaaaagtcctatcggaatggcaaacaacgccactcccattccctctcttagtacgatttgtctaagctgccgtttcgtagccccgattgcctttaactttccaaattcccgaaccctctggttcatagatacataataaacactataaattgtgataatgcccgccaatacaacaataagcatgattcctacaatcaccggaattgtagccggatccacataatttgctgcaagatactctttattaatattcatgtcatcctcggaaatcccgaactgtctggcaatattctgtatcgtctctgtataatctgcagtcgtatttcctttctgtccattcacctgaagtaaaaaccgatatttcacctgttctaccggtatctccgctttcagaaaggcctctgaaaccaatgatgtatattgtttttgttctttgctgctctcattatctgctaaaaaaccacagattcgaaagtctttctccttcgtataatccagtccgtcatctttcagaatctgataaggtactgtgatagtgtcaccgattttcccattctgtcctaatgcttccagtattccttttgaaaccacaatatcattttctttctgcggaagttgcccctctttcagcttcactttataaagttccatccctgttctgtccatatacatcatggaaaccgtcgcatcttccagattcatgtaccccgcatcgctgcggagtccgtaagttttcacatcatgatgtgccgccagtttcataactgtactctcgtccacgttccgataaagggcatgccatgttggataaatcttattgattaccgcaaagttcacttccaccatatcttttccgattgatgggattacgaacagcagtaatgttgtcaggataatggcaattccaatcagtatgtttttgctcttataatgccgcatattgcaatatgcaactctggtcgtcatcttcattatcttctcaccgccttgccatcttcaatgataatcatttcatccgccatctgggcaatcgtttcatcatgggtaatcatgataagcgtctgcccgaaatccgacacacagcttttcaataggctcataacctctagctcagtctgggaatcaaggtttccagtcggctcatccgccaaaattatcgccggtcttgtcaccaatgccctggctatcgcagttctctgtttctgtccaccagacaaagcagacggcatcgcatctttcttatcctgcagtccgatttttttgagaatatcttccacttcccgcggctttaccttgcgattatcaagtcccagcggaagaacgatattctcccacacattcagcgatggaatcagattaaaatcctgaaagataaatcctatcttctttcttcgaaactgtgccagtttatcatcttttcgagaatagatatcggttccatcaatccatactttgccggaatccggtctgtcaagccctccaatcagatgcagaagtgtagattttccggagccggaacgtcctacgatagctgtaaacttgcctctctctatctgtaaacttgtatgatccacggctctcacctgattctcgccttctccataatactttactagatcttctacttttaaaatactactcatatcttcaagtcccctttccatttcatacccctactataacattcctgcattacaaaacccttacaacaaccataacagttttgtaagggttccgactattctcctattatgagcggcagtgtcactttaaatatcatacctttctcagcctttcttttggctgctattgtccccccctgttcttctatgatctttctggcaagatacagaccgacacccgctccgtcttttacctgttcctttgctttccttccccggtaaaatctctgatagatcttatgcagttcctccgcaggaatgcccattccttcatcttctacttcaataagcacattgcttgctagctcctgcgtcctcactgtaatcgttgtatgttccggtgaatatttgactgcattctcaaggatattcgttaatgcttctaccgtccattttgaatcatggttcacaactatatcatcatccatctccacctgaatggaaatatcttttcctcttgccttcatataaatctgactgacagcctctgttagcgttttcttcaggctttcatgaagcgaatgtatctggatcatatgtgtttccagccttgaaagatttaccagttcattcaagagctgttccagtttggtaagttcctgtgattcctgctccagaaactccctctgttcttctcctgtaacccgattttctgccaccagctcatgactcatccggagtgatgcaagcggagtcttcaactgatgggaaatatctgtaatcagactcttcgtaccattttcttcctgctccagacgttccttcaaatcttcgaaatattgccccagctcctttacagattcccacacctttaaccattgttccgattctgatgtttcttcaggatatgtttggaattttccttttctgaattcctgcagacattcatataattgctgtaattgttcctcatcaccgtatctgctccagttttttcttcggtccaggtacaagaacaggctacatactatgactcccactagtataacgaatattaaataattgctatattaaattgatactgcttcctcttcactgatttcatccattttatacttccagtgataaaccacgggttcacggttcacttcgtcaaagtacttgtaaattcgttcttccaactcctgtttggtattgacacgaattcctcgaagcatctgtctggtcatcttgctgaagaagctttcaatcatgtttaaccatgagccatgttttggtgtaaacacaaatttaaaacgtccctttggcatagtatccagaaagcgccgtgtttctttggaagtatgtgcagaatgattatccaggatgatccgaatggtatcctgtgatggatattttttgtccagtatctttaaaaactcaataaaatcagaactcttatgggtctcacttactaacggaattgcttctccagtgagtaaatcaatgccagccagtaaagagagcgttcccagacgtttgtattctgcatcacgatatacttccccatgttctgatgtcgggcgtaaatccggtaccgtattggagattgcctgaatgcccggcttctcatcatacgataccgtaatcgtcagtttataatcgtctggaacaatgagatcaccattttcatcaaactgcatttcaatctgcttataaaccaacagaacctcatgcatttttgattcaaaatcaggatcccgtttttcacagtaatatttgattttaaagggtttcatatcctgttccttaagaaatttctggatatacggtttggtaacggttgaaagccttggatatcccgcttcttctgcatgtttctgaatgtatttgtggagagaggtcaacgtccacaattcctgtgcataaccgagttctgtcggtctctgacacgcaatatgaatcatccatgcttttgcatcatcagtgatttccgatggacgtccaggacgctgaacatcaaacagtgcagcatctaaaccgcctttctgaaacttcgaaatacaaaggcgtaccgttgcggtactaatggcaagtttatcagcaatttgctggaatgtcattccatcggctttatataaaaggattctggcacggtccacaacttgtgcctgaatggttctctttttggataatgctttaaggtaatctctgtcttcatctgacagaggaagatatgtttttctcatagtgttcatcctttcttagataacactattttaccatacattatcctcaaaatatatagtagaaatttaatttattctatactagtaatccaattccccagataatccttataaccacatctgaagatccactccctgagtgataaccataagtttcttccagcatctgtacgactctttctatcttctgatcgtcccggtctcttataaaatctactgttcctgacttttcccagattgcaactatttccccttccagttcaggatgttctgcaaggagcagtgctatctgcgttgctttcgcattttcctcatactttgttatcagatacattcctactgtaaaaaatactgcaaagattacatatacgataaaataccgttttaatttttgtttacctttccggtccatatatatcccagtcctctcacattcgctatctcttctgttccaagtttattcttcagtctgcttatattgacagtaaccgtattatcatcgacaaattgaccgtctatatcccatacatgctccaggatactttcttttgaaacaatctgtcctgcattctcccagagatacagcaacagagagaattctttcttacttaaagtaactggttcatcccctttatacacctgcatcgttttcatatgcaccgtaatctctccggaagacataatctgtgcctgtaccttagaaagccgtctcatcaatgcgttcaccttcgacaccaaagccatcagtgaaaatggtttggtaatataatcatctgcccctgtatcataaccatttacaatatctatttcctgatccaaagccgtaagatagataagatatgtatctccacctgcacgtaccatccttccaaaatccagtcctgtaccatccggcaatgtaatatcgctgataacaagagcataatctcctttttgaaatgcttcttttgcttcctttattgtataaacctgacgaacctcatacccttcccgtgaaagtaacagggcaattccccgatttagattcaagtcatcctccagtaataatattttctgcatcaaatactccacctctatttgtaataacctgttcttttatcatatcagtcctatcttttgtctacaataaaaataaaattaacatacatacttttccttcatatgttcaaggatttcaccggatactgcttcagaaatcgatcaatccatttctgattgcttctctgtaacatccgaagtctggataaaagctgtagacaactgcagctctatgttactaaagtcctatccatcaatacaggagttatagaatgccgtgaagataccgtcaaattccatttcaataatatgtaggctgtccattgtgtgctccagataagtcagtgttcctctatccaaatctatactcggctttcctagtgagtttgctattacatctggatttgtaattccaaacatctcctttatatccggcataagataatccacgatatccggcagccttttctcatacgcctgtgccagttcaactgcatgcttctcataatcggaatgtatactgtcacagacaaattcaatcccgtttatttccatcttatagtaatcattattctcatcatagacaaacgctgtacccttactttttttatttttttccaaaatccccatgatatatctacactttcccggttcttccgccatacacagtctaaaaactgtaacttaatgcttacgtttgtaaaaaataactcctgccaaaatcaataaaataattccaactacaatcataaaaataaaattatcaccatttaacttccctgctatgaaaatagaagtcgggccatccgcaccaccaataacagaaacggctgtgttttctttctgcttcagtacaatgccaatgactgccaatacaattcctaaaattccggctatgattcccaatcgctttttcattgctaccacctcaaatcatttttatctgctcaatcaaatgtaaattgttatgcaagtatttctatgcaaatgaagcatagataacccatatttctgcaaacattaccaataaaagtacaccatctatcatccaattaaactgaatgtccgttaagaaagtttttgaatgtgtcaggcaatattttactttttctcgtccagtcaaaaaagtgataagcacttgtaatataggaaataaaaatatttgtatttttcttccataatcatccgcaatcccatttgcaaaatgtactggaataatactcggtaagaaaaatatacttacaagagcaagcaaaaatcctattatacaaattatccatgtgaattttctagtattgataaatttcataacaatccttctttctgctaaattcaagtttttccaatacataacacgtacttacattatactcctcaccaatgcaaacctcaatttattctccatcctttttcccgttattaagcttcgggcagtaaaatgcctttacttccaccccatcttcctccgactcaatttccacataataatcccggataaagtatcccgcattatgctcctgaatggcgtacagctccaatgtctgaaaatccaccagtaccagatcacggggcttgggtttttgcgtttcctcacagaatacctccatgctttccaccagcttatccaggcattcctgacacagatggttctgtacttttttcacatcgaagatactatcttccccgtaatccaccgatacttcggaaatcccgtaatccgacatctgctccgtatggaaaaagcagccgccttctcctgtcccggtataacccatatgcccgtttccctgcgggccggtaagattcccgtcctcatcatgattccggatatgcatatccatcacataccagtgattggtacagatcactcccagatcgtcaaacttccggaaataatccatcatactccgttcatcgcttccacacagccagcactgttttggatctttcagcttgctttctactgattcaggcacctttctttctaccgggtgatattcctgctcctgtgttttttcaagataacctgtcagatccagccggctgattcccagtccgatcagaattcctgacgcacatgccaataatcccacatatccctttttcatattatagtcatcctttaagaattagttttataatgcttttaggattactatatcaaatcttgcaatcactttcatcataaatcgcatatttttatgtgttttattgcatatacagctttcaaaaaaactgcctgcggcaatttcgcagacagcttctatttcatcatctcttcaattatcacatccagcatccgaagcacgctttcctgcttcttcggtgtgagcctttccagctttccttccactacagaagtatgttccattctggtaagaggaatcacttccttcagcacttcattcggttccgcacctaatacattcaacagctttacaaatgtttccatcgtaggtgttttcacttcccgctcaatcgcacccagatggttggtactgatatccaccagttcagccagtctctcctgcgtaattcctgcctcttccctgtacctgcggattgcctttcccattcctttcacacgcacacctcctccttccagtattcactaacgcttaaagcattagtcatgtaaatccagtataattggttgcaaatcacgcttacagtatccataaggattgcatttataacgcttttagcgttggtcacatttttggcactccatcgtctgtaactggcacagtcctgcgattgtagcggtaatttacccatgttaaaattgatattgtcaaaattatatgcagaacgaaacgcagcactgccgtatgggaagcctctcctgcggcaaataagctgcgttttttctgtaagataggaggatctttacaatttcatactttgatttaggacgcagcctgcattgaccgggctgcgtcctttcttgaggcaggaaaaccataagcaaaggcaggggaggtaattctcctgccgctcttataaaaaggaggtacttttacgtgaaacacaaactgaaaaacgctccgccggacacaaaacggcatgtcaattatggcagatgcctgtatgctgcatttctggctgtcacagtcctctgcggatacacacagccggtttttgccgctaccatctggaccaaagccaatgagatcatgaaggatgtctataaccagattatcctcatttccaccattgctgcagtcgtaacggcatcggttgcccttctgatgatgaatttttccaaaagcggaaaaaccgtggacgaatcacgtgcatggctcaagcgtatcgtcattacctgggcgatcttaaacgggcttggctttatcatggcttacatcaccccgttctttgcaggcggaaaatggaacggatagacgaaaggagatgccactatgggaatacttgacggaatcgtggaatggattgccgaacaggtcatgaacattctggatctgatcaccacttcagtcctcggtgctctgggctgttccatggatacgtttcttcgctactttcctgctgccgagaccatgtatcaggtctttctggcactgggcatcgggctgatcctcttaaactgggtatggcagctctttaaaaattactttatgggagccggtatcgaagcggaagatcccattaagctgtccatccgttccttcctctttatctttctcaccttctatgcgaaagatattgtggatctgctcctgaagatttcaggaacaccgtacaactggattctgacggaagacctgccgcctttaaaatttgcggattttaactccgtagtcacagtcatcctgggagtctgtgcaaatggggcggtagccatcattgcactgattctggtactgattctggcgtggaactacatcaaactgctctttgaagcggcagaacgctatattcttctgggggtactggtctacacagccccggcagctttttccatgggtgccagccagtcaaccggaaatatcttcaaaagctggtgccggatgcttggcggccagttctttttgcttctgatgaatgcgtggtgcctgcggctgtttacttctatggtcggcaccttccttgccaatccgttatccctataagaaaggaggaccaaaatgaaacttagaaagaaactcataccattcctggtactaactgcctgtctggtactgttttgctccatgccggtctttgcagcggagcttacggaagcagacgtggaagcggcagttgccagtcagggaaaggaagcggtaaccggaaatgtcttcgtctggttcctgtgtgccattgcctttttaaaggtatcccagaaaattgattcttttctggcatcgcttggcatcaatgtcggcaataccggaggaaacatgatggctgaacttctgattgcaggacggagcctgaccggttccatgcgttcccatggtggtggcggctaccacaaagcctcttctcccggaagtgcggctgtcgcaggaagcttcctatccggcgggcttgccggggcagtgggaagacaggtacaaagagaagcggtcaattccgcaaccggttataccgaacacagcagtatcggaaacatgctctaccagtcatccctgaacaaaggcggagactttgccaatcaggtcatcagcaacattgcacagggaaattacggtcaggtaggttccatcaagggagcagacgcacagaaagcctttacttcctatatgggcatcaatccgggcggcggttcttcctatgataatgtagaaatcggtggcggaaggatcaccggtaccgaaaccggaagctccggaaaccgggattttgccctgtaccatgccgaccagtatgcagctcctactcagggctcctactctacggtacagtccgtggatggttccacctggtacaagcagtatgcacaggatacggtcgaaaaaacaccatatacttccggcagcggcaaagtagcctacaatgaatccattgtccagaaactgccgccagccccacagcgaaaggagcgtatgtaacatgccaaaaacagccttgatgggcagtcctcttgctgtcatcggtacagtattccggcacaggcgcacccttgcgaaaactggagcagccgtcggcggtgtactgatgcttcccattctgttccttgtcatgcttccgggactcgtcttcggagacctctctgaaaataccggagcactgaccagcaacacggtaatcagtgaaaatatccgggcttccaatcaggcaatcgtggaggtgcttcaggaaagccatgatgcactgcttgctaagatcaatgcggaaattgccagactcccggaaggagatactgcctctatcagcgatccttacgcttccagtatcatcgtaaatgcgaaccagctcatcgcacagttttgtgccagccaggatgactataaaaatataaatatcagcaaactcaaaagcctgatccgggaaaacgaggacgggcttttttcttatgacgttacttcagaaacggccacggtggaagttccggcggaagaggaaaatgcaccacccagaaaggttacttttacccgccatacctacacggtcagctatgccggagatgcctactttgcagatcacgtctttcatctgaccgataagcagaaaaaaacggcagacagttatgtggaaaacctgaccatgttctttggcggctccgcttccggtcttgccatggcggtaggtgtcagcgatgaggtgctggcttaccgggctaccatccagcaggtcgcacagaaatacggcatggaagcttatgtggaactcctcatggcagtcatgatgcaggaaagcggcgggcgtggaagcgatcccatgcaggcggcagaaggcggctttaataagaaatacccccatgtccccaacggcatcaccgatcctgcttattccatcgaatgtgggattcaggaattaaagtatgcactggataaagcaggatgtaccggacctaccgacctggaccgcatcaagctggcgcttcagggttacaattacggctccggctatatcgactgggcaatggaacgtgacggcggttataccaaagaaaacgccattgcttattcggatatgatgtgtgcccgtccgaactggcattatgaccggtatggggacaaggaatatgtggagcatgttctccggtattatcagattaccaataccggcggaagctatccggcaaacggaatgcagattccgcactatctccagaccgattacgggaacattccttatggcggcggctccatcgcatcttccggctgcgggcctaccagctttgccatgatcgccagctacctgaccgggaataccattacccctccggatgcggtggcatggtgcgggaattcctattacaagccgggagttggaacctactggagctactttcaggctgcagccagtcatttcggctgtggcagcgtcacacagaccagcaatgccaatacggtacttcaggcactctccgaaggctgtccggtcatctcctctcagcgggcaggacttttcaccagcggcggacacttcatcgtactccgaggtgttacggcaaacggcaaggtactggtcaatgatcccaatgacagtgacgcaaagaactatattaaccgtgaatttgatatgatgtcggaaatccatgctacggcaaatgcctactggatcttcgacaaaaaataaaggagccattatgaacagaacaaaagtgattctttccatttttctgatgctgtttctgctgcttgccggactggttctccccagtttctggaaaagccagaaaaaagaagcttccggaaacaaaggcagggaaccggcaaaggaaacaacagaaacaaattctgatacccccatgccggaatatctggattttgatgctttaaaagcatttttctccgacagccagattgcttctctcaaagggcagtttcctgtctacctaaaagagtatgtcaaaaaagaacagacaagcatcaccttcctgccggaaaaaaccagctaccctaccgaaacaaccgtctgcctgatgttttcactttccgatcaggatacgcttccggttacctatcacaccccgacgggtgtgtttttatttggagaagacggggtacaggtctctgcagatacgactgtttacgaaaagcaaaccgatgattccctgccgtccctgacttcgcaggacattgaacacctgcaggaaggcgggtatccggatacttctgacagcccggaagctccggacacagaatccggcagtgcctctgtgccttccgaagatgcgaaagatacgaaaaaggaggtgcagccatgacacagccagaagaaacaccggtttcctttatcccttccaacttcattgagaaaggcaagatcctaaacggaacttttgacatccgcaatgccatagaaagcattgttctttccctggcaatcggtatccctgttttccacctgccgctgtccctgactgcccgcatcatcattctctgcatgaccgcacttccagcggcaatggtagccctgattggaatcggcggggagagcatcactgcctttttgatgaatgccctgcgttttgtagtgaaccgcagggtaatctggaggtccgacagtcttccggaaggaaagccacgcaggaaaccacgtttcaaagagccaaagacaaagaaacaccggaaagcagaaaaaatggcagagccttccaaagtaatggcatcggctcccccacagtctgaaccggacgcaccagctccgccaaaaagtaaaaaaaaagaacaccggcagtttgatacctccaccaagcggggcatcaaaaaacaggcaaaggaagatatccgttatctgaagtgggagcagaaagaagccagccgacagaaaaaagaggcggcgaaacagataaaaatacagaaaaaaacggaagcccggagacgaaaggaggaagaaaaacgggcagtttccgaaaagcgggctgcaaaaaaagagcagaaaaaaaaggtggtttccaaggaggacacctcatctgccacgtcaaaacccgtttcccggaaaaagcgaaagaaagaccagaccttggaggattatcttccggtggaaaaaatcgcaaacggaatcgtctataccacagacggacggtacgtgaagatcctggagattgaaccaatcaactttctgcttcgaagtgccagggaacagcagggcattatctacagctttatcagttacttaaagatcagccctgtcaaactccagatcaagatgatctccaaaaaagcagacatcaataagcatctggagcagtcccagctggagctggagcgggaaaccgatccccactgtcaggaactgcagcgtgactacatccagtttgtccagaacttaagttccagagaagcagtatccagacggttctttctgatctttgaatatgaaccattcaacgcaaaccgaaaggaagaggaacgggaaatccttgctgctcttgagacagcctcccagaccgccaaaacctttctataccagtgcgggaatgaagtggtctcccatgacaatgaggatgaatttactacggatgttctctacacccttttaaaccgtaccctttgtacggaggttccgctttcgaaccggatcagcactgtactgtccgcctatacaaaggaaaatcgcatggaggaactggatcacatccggatcaacgagtttctcgcaccggaaagtgtggatttcaagcactcccattatgtgcagatcaatgggctttaccattcctacctgcttgtgccgtctgacggctacaaaaaccgggtaactcccggatggctgtcactccttgtcaatgccggggaagggattgatattgatttctttctccagaaacagccaaaggacaagattcagcagcgtctcggtcagcagatccgtatcaaccgttccaaattaaaggatgcgtccgataccaacactgattatgacgatctggattctgccatccgctccggatattttctgaagcagggacttgccaacaacgaagatttctattacatgaatcttctcatcaccattactgcttccacgttggaagaactgcagtggcggattcaggaaatgaaaaagctcctgatctcgcaggatatgaacttacactcctgctactttttacaggagcagggatttttatcctctctgccgctggcaaatctggacaagaagctttttaagctgtccaagcggaacgtactgacttccggggcggcaagctgctatcccttcgtcagctacagtatctgcgatgataacggaatcctctttggggtaaacaagcataacaattccctggtcattgcggatatctttgattccaggcagtacaagaacagcaacatctgtatcttaggctgttcgggagcaggaaagaccttcaccatgcagaccatggcactaaggatgcgaagaaaaggcatccaggtgttcatcatcgctccgctaaagggacacgaattttaccgggctgcaaggaatgtcggcggagaatttatccagatctctcctgccagtaagaactgtatcaacatcatggaaatccggaaggtagacaattctgtaaatgaactgctggacggaccgacactggatgcctccgcactggcaggcaagatccaaaggcttcacatcttcttcagtctgctgatcccggatatgtcccatgaggagaagcagcttctggatgaagccctaatcaaaacctatgccagaaaagggattacacataaaaatgaatccctgacagatccgcagcatccggagcagtacaaaaagatgcccattctggaggatgtctacaatgtcctgctggaaagcgaggataccaaacgtctggctcatatcctgaaccgcctggttcacggttctgcttcttcctttaaccagcagaccaatgtggacctgaccaataaatatacggtactggatatctccgaactgaccggttccagcgatcttttaacggtcggcatgttcgttgccctggattatgtctgggataaagcgaaggaaaaccgtaccgaagagaaagccatctttgtcgatgaggtctggcagctcatcggtgcatccagcaaccggcttgcagcggaattcgtactggagattgccaagatcatccgtgcttactccggagccggcatctttgccacacaggatttaaacgacttctttgctctggatgacgggaagtacggcaagggtatcatcaataactgcaagaccaagattatcctgaacatggaggatgaagaggcacagcgggtgaagactatcctgcatctatcggaaacagaagtaatgaacatcacccatttccagcggggcaacggtctgatctcaaccaacaacaataacatcactgtggaatttaaggcttccaatctggaaaaggagctgattaccacagatcggcaggagcttctggaaatccttgcgaaacagaagaaacaggctgtgtaacttttggcagcactgacgctgcccttttcatttgaacttcaagaaggaggagacttatgttacagacatacaaatcctataccagacggacgctggctatgctgctggcagtccttgtcgcagtcggcgcattgttttccggcagttttccggttcatgcagccgacggcaccatcagctataaggcaggtgccaatatcccttacggcagctattttacctcccgcatgagctttgacgggagcaatactgcctactgcgtggaaccactgaagaaaacaccttcctctggttcctattcctatgaccttttaagccagaactccccgctcagaaaagcgctctactacttaaacggcggttacggctacgataaagtcgtcaaggataaatatttcagtggctggagtgatgataacagctatgtcatcggacatctggttgtcgcttacatctatgccggtaattccgctgacaccggagctttccatggcgccccgcagtcctatattgataaagcactggaagtagccagtgccattcagggacttccgaacccgccggaaggcttccgggcattcatcgttccgggacagggcagccagaccattgccggaagctggtatcaggttccaaacggctggatcgaactgaaaaaatcttctgccaacggaagcgtatcggacgggaatccgaattacagcttaaagggtgctgtgtatgggatctatcagggtgagaagctcatccagaaactgaccactgatgaaaacgggtatgccagatccggcgaactggaggaaggcgattataccataaaagagctctctgcttccaaaggctacattgtagacaccaaagctcacaaagtcaccgtaaaagcagaacagacttctgctgcaaacgtaacagatattccgcagaataatcccatgaatctggtgcttgaaaagctggatgccgaaacaaagaaagcctccccacagggagcagcttcccttgcaaacgcagaatttacagtcaagttctataccgagcagtctgacagtgatcctgcggaagctggaaagaaaccggcacgtacctgggtattaaaaacagatgtttccggaaagatgcattttaccaaagattcctttgtaagcggcgatgccttttactataccagtgatggcaagaccgtctgtcttccgctcggtaccataacggtacaggaaagcaaagcccctgccggataccagctcaatccaactgtcttcgtacagaaaattacaggtgacggtaagcaggaaatggtttcggtataccagtcttctaccatagaagaatctgtcatccgtggcggagtgaagatccagaaacgtgacagcgagaccggagaagcaaaaccgcagggttctgccactttggaaggtactgtctttgcgatcactacgttaaatgaaaatccggtattagtagacggaacatcctacacgaaagatcaggttgtccttacacttactgccgataaatccggttctgctgcaactgcaaaagatgctctcccattcggacattaccgtgtggatgaaacaactgcaccttccggttatctgaacagcggaaagatctctgtagaatttgacatcacagaacagggaaaaatcgtggaactgactgcaaaagacaattccatctccaatcaggtcatccgcggggatctggaatttgtcaagattgctgacggcagccagaaccgtctggcaaatgtgccatttaagatcacttccaaaacaacaggcgaaagccatgtgattgtgacagatgccaacggttatgccagcacttcctccaaatggaacaaacataccgcaaataccaaccggggtgagtcttcggaagacggcatctggttcggcacctccaaaccggatgattccaaaggcgctctcatttacgatacttacactctggcggaacagcgttgtgattccaacaaaggcatggatcttttaacctttgaagtcaaggtttataaggattctgttctgatacaggttggaactctgaccgatgatgccattgagatcggcacgactgctctggatgccgagaccggtacacacatgagccagccggcaaaagaagtgaccattgaagacgttgtggaatacgaaggactgaaaaagggccagaaatacaaactgactggaaccttaatggataaaaaaaccggggaaccaatccttgtggatgaaaaaccggtgatttctgaaactgaatttactgcaaagaaatcctccggctccgtcaaagtaacctttacctttgatgcaacttccttaaagggaaaaacaaccgttgtcttcgaggaattatatcaggatgagatgcagcttgcagtccataccgacatcaacgatgaagaccagaccatctatttcccggaaatcaagactactgcgaaagatgcggacacgaactccaatatttcctgtgcaaaggaagaaatcacgctggtggatacggtttcctttaaggggctggttcctaaccagaaatatgaagtgactggaactctgatagataaagaaacaaagaaaccagtcgaagcagacggaaaaccggtgacagcaaaagcatccttcaagccaaaagaatccgctggtacggtagatgttacctttacctttgatgccagctccttaaaagggaaaacagtagttgtctttgaatccctggcttacaaagacaaggaagttgccgtacacacagacattgcggatgaaggacagactatttacttcccggaaatcaaaaccactgcaacagatgctgcttccggcacacactatgcaaaaccggaaggaaaggagcgtgaaatcaatgaagaatacaaatataaccttacacaccacccaaaagaaagaatatgtcctcaccagaatcctgtccctgcccctccatctgggagaacgggcgtggatctatagttataaccagacctttgctaccagtccggtgcagagtattctggaagtatccgaaaacggtgtggtatttgagacctgcaacagtatttaccgtctcagctacacccgtgttccgatggagctggaggcgatgtgtgcttgacaagaatggaagaactggagagctgcctttcggggctcctctccaccttaaagaagaaccgggaacatgtgcctctggaagtgctgaagacacagtataagcagccgtatgaagaactggtcagaaacatcaacctgaccgcttctgcctatgcaaaatctgtgctgctccaccggctggtcctgaatccggatgcagatgtggaggaacaatgtaccgtcatcaaccagatgatacaaacttccgggatgctgaagaaaatcagctcctgcatgtccaaaacctatgatgtaggacagatatatcctctgatactggaactacgccatatggtcgaacaggcactctggccctatgtgaatcaggcaacttgtctggtcgcagatctggatgatatagaaaaagaaccgacaatttacaattttttgacacatgaagtttatgaaaatgatacctggattcaccgagaaatcgacctgcgctggaaactactggtacatcttactcccgaacaaagagaatccgtaccaccagccaatcatagtatgaatggaggaatttaccatgaaagaacaaccatctaatccttgcgagaaagtctcatttattttgacctatgaccagcttgaagctgcttataacatctaccgggaacaatttatttcctgcgacttcatccgccgctccatggaacgtctggaggaaagaatcggactctgcaaccttccatatgaaacgctgcgtgatgatccaagccttcttcatgaagcatacctgcagtttctccgactggaagactgcaatgtggcttataacgacacgctggagcaggtaattgatgcaatcgaacaatggcttgcctctggcaccttatcccctgtaaaccttacggtttccaaccagaatatgggtgaaacttttggaacggaggtggatgtgtaatggcaaatatctgctgtgatgatgtgatcttttatacagaaggaaatccggaaggactatatgacttgtgggaggacctggaaacctacatcattctgaaccagaatcctgatttatgctggattggcaatttattttcccacaagaaaatagattccaccggaatatctcttcgtggaaatgtcagctacatggaatggaatgatacgtatattctactttctttagagacagcatggactccactttatgaagcatatcaggcgatagccgctgcatatcatgttccctttgtgatgcaaagcatagaacctggagaacgaatttattataacacggatgaagcacacctatttttccctgaccgatattgtgtccgcttatatgaagaaagcctattgactccatgtggcttaataatcggagaaaagctggaagacggtgaaccatttgaaacggaaacagacgtattagaacgattcagagattgcggatatccagcagctacactaaaagagttggagctcatgttcgatgcggatgaacttattatttttgaatttacaaatccatatttggatctggagcagaaaaatgcttgtgcatgaaacttctcccctccacaccaaagacgattatcatcagatttaaaggaggaacaccatgactgatttggaactggatgtctgggatgcatggctcagggaacgtcaggaacatctggaagaaaccctgtccaatatctcaccatcggaagaaccctgcagatattacctgctaaccggatatattcagggaatgctagaagctcttaccatgcttacgactgttgaggatgggaaacgcttcaagatcaaactggagcaatttcgccagaatctgctcctctctggagattacgatgctaccggtaactataaacaggcagtgaagaaaactgctgtttaaatacttcgagccgcccaatcggacggctctttttatgcccgaaaacggtagcctacaccacgtatcgtttctatgtagtgcggttcttccggattttcttctattttctttctcagattcttgactaacccatagacacggttatccacttctgactccacatcctcataaatatgctggtaaatctgttcttttgtaaatacccgattgggggataaggccagataaaaaagcaggtcatattcatgtctggtaagttccacaaccttaccatctttgattacgctccgctgaagctggtctatttccaaaccttggaatgtcaacttttcagaatttgtaatctccataacttctaacgtactttcgcaggctagaactgatttaattttattcaggattccctcttcggaatcagaaatggtaagaatcatcactttcccataacatcacctgcttttcttagcatttagctttcactcctcattaacaatgtttatcgattggttacatagatatatgcatcttccaaagttacgtcacaagctatacatccactttctgacggcatattctcccctaacagtcttaatctaattccttcctccgtatactgcttactggaaatatgatattttctttctaattctcttgcaaggctttcgtcctctgtacagcattcccatacatgccctcttgccttattcaataattccctcattgttcctgtataaaggaatctaccttttttcataaccgcaagctgattacaggttgccatcagatcctccaccacatgcgttgaaaataatacggtgcgttcttctgcaaaatctaccagtaaattacggatacggatgcgttcctccggatcgagccctgttgttggttcatccacaattaaaaaatccggctcatggagtaatgcctgcactaatccaactcttcgcttcattccacctgaaagctgccgcattttctttttctgatggtctgcaagactggtcttctccagatagtaatcaatccttttcttgctttctcttttctcaattccagccagatctcccatatactccagacattctcgaacagtcaaagacggatacagatcaatttcctgtggcagatacccaatctttttctgtatcttttcgtaatttgcttcgcaatatagcgtaccatctaacagaacttttccacttgtgggtgcaagcaccgttgtaagcacccgcatcaacgttgtttttcctgcaccattttcacctaacagaccaaatatcccatgtgggatttccagatccacatgatctaccgctgtcactccatttttaaatgttactgttaaatcgtctattcttatactcataatcttaccctctcttctttaatatcttaggaacaaatgcaagcatcatccccgcaaataccacgcacagcaccttcccgccaagccatctccactctgtcagcttaccgaaatcacaagttccgtaggaaaatggtccccagtttttcaaaaactgagttgcctttccggaaatagagaaaaaccagaaaagcagcacgacacccataccaatccatctgtttcgaaccagattgctgacagttacggaaagcacactccaaaacaaaacagttccgggaatcgcaatacaataaattccaaacaaggcaccgccatctaattcttctgtcagattcaccggtttctgccaataaaagagtccatatgccaacaaactgattccaatcagataagctacctgcacaaatagtcttttataaactacccctgcctgcttttttagattataaaggcagaatacttccgagcgtttgctctgcacttccaccagataagtatctgcacagaaaacgactgccagaagcgaaacagctctttctactgcctgcccgatttcattcgcatatacaacaggctggattgcactcaatatcacaacaaaagcgattgaatatgcaattttataatatggcatacatatttttacttctttcttcaatatactctcctccttttccacatccacaccgctataaacatgagcagtatggatgctgccacaagaagcagttgattgagatatacctgatgtggcaattccgtttcaaaaaaattccccggaaatcgaaccataatagagaatggtcttgcatgacactgtcctttgctatcccatgtcagcatattagaataaatgatataaagaaccagcgccggaaccgctggaagcggattcttaaacagcagcgctgtaaccgcatacacacagcagatcatcaggatgttcggcaggacatacaggatcgaattctgaacaaaatccagtatgttcatagcaaatcctgattttactgccgtggcgtaacacaaaatgataaatacgatattcataatgaccagtgccgccgtcataatgagaaatccactgcttattttcccggcaatatattgaaaagccgtcatcggtttggtgtgcagcaattcataagtatttttcctcatatcctggaaaaataaaaacgccagcagaaccgttgcaaagaatgccatatgcaggcttgcaaaatctgtaaattttcttccgaaataataggagaatggatgtttctcaagattttctctgatataccggttgacttcctccgggcttccctgataccatgaaacgtcctcatacacataattggcaccattaaagtggtattccgttttcagatactgacacgcctccgtaatcttcatctgtttcatctcagatatcactgcctccgcctctacttccgacatgccaaacccattctctgtgtcctgaagtatctttacaatctctttctcccacagttctctctccttatccggtgttgccggaatacatccctccataacatccccatcggaggccatttttaccttcctgaaggtttcatccgacttcacgtaatgaatggacagatagggtgcaagtgtctggtacatactgattaaaacaacaatcaaaccgatccagaatatcggatttttaagataatttttcagattcctttttatgattgctttcataagtcatcccgcctttcttttttctacaaacagcatagcctacaaatcacaacaaaaaaacaacagccatttatttctgctgttgttcttctaatacataatttttaaacactgcctcaacttccgcaccgccatctgctacattttttatcagcagtttcccaccatgccgttcgcagtagatacggctgatatacatacccattccaaaatgctttaagtcatcctgtggattctcatgataaaacgcctgtgtcaccctgtcgatattttcctgaaatccaattccgtcatccctgatactcattttcagatattggggtgtcactgtcagcttcagcctaacttcctgattggcatagcggaatgcgttagccaacagattatccgctacttccatgatgatttcctcatccgcagtcagtatttcagattctctcactgtcgtcactgtaaaattcttttctgatttttccaccacgacttctgccagagcttctatctggtttatcaactgccggatatctaccacggaacagtttaattcccgttcttccaatttcgtcatcttcctcatactatcaataaaatggttcatccgttcaatctgaagcataccgccccttaacatctccatcattttctcttgatcaagcatatcttccggaacaaattccaaaagcatttcctgatatccccgcatgattgcaagcggcgagcggatatcatgggcaatcgctgcacgcagtacccgctcatcttcgatcatctgccaaagtctacggttattttcttccaactgcccacgcatcctttcaaattccctgcacagcatccccatctcgtcctcgttctcataagccatatgaaaatccagatcttcctccgcaatcatctgtgatgccatcttcagttcctgaatcggtctctttaatttatttttgtaaaacaggctgaccgcaattccacatccggcaaaagaaaaaagcaatactccgtacgtccgaaggaaatcacaggtttctgaaatatgccagtccattctgctcattttactctgattcggtctcggtaccactacctcaaaattttcattgcggtcattcattgcctgataatactcgtcctgatccacgtacttccaccagacctcctcctgtatctgcccggcaatctcaataattgacacagaaagaaaaaaagtgacaatcaagctgagtatcgtatataaaaccattgtctttttcaaggataaatttcttatcttttccatcgataccccatcccccatactgtctcaatgtattctgtctgcgtatattccgccagtttctttctcactctccggatcagttccgtaacaacacggctgtcaccttccgcatcataaccacacaccttttcgtatatccgctccctgtcaaaaacctgtcctggattcatggacaaaaactcaatgattgcatattccagcttcgtaagctccaaatcattttcaccgatctgaaccctctttgctccataatcaatactgaggtctccgtggaatctgtattcagacttccctttatgacgctcctcacgcttcaaatgtgcaataatacgagcatccagttctttcagactaaacggcttcagtatatagtcatccccaccggataaaagcccgtttaccctgtcctgctcctccacttttgccgtcaggaagataatgggacaagttactttgccccggatacgtctgcatacttctaatccgtctattttaggcatattgatgtccagcaagataatatccggtttcttatggattttttccaaagcatctgtgccatcttctgccatcattacatcatatcgtttgatttcaaaatagttctttaacatctttaataattcgatgtcatcatccacgatcaaaattctatatgccacttttatcacctcgttttatcagtatacaacgaaaaaaacaataaataaacaacaagagaaacacttcgagccgcccattgccggacggctccttttatgcccgaaagcgataaccaacaccacgtatcgtttctatgtagtgcggtgtttccggattttcttctattttctttctcaagttcttaatcagaccgtaaattcggttattcacttctgactccgcttcctcatagatatgctgatagatctgttctttcgtgaatacccgattaggagataaagcaaccacagcgatttgcttcaaaagtctctttcgcctggtataccgtttataacttctcatgtttatcaccttcaatctgctttcaaatttaataatctatattttatgacaattcagcatatagaaaagttagttattcgtgaaaattatttttaaatttagaacttgcataaccactacgatgtaaaaacagtttagaggcatttatgacagagattgattttatctggttttcgactttctccacgaaagtggcaaaaaatacctggctacgaattccttcgcttagggcaaatctgaaatcctgaacgcttttattcctgtagccgacaaatttgtcatcaacataaggcaaaagcttcattgaggaatctatttcatttgacatatactacatctagtgttatactgttcttatatcaattatttgtgtcaatccggaaaggatttatcacacgcagtttaggtttgaaacgtagtcaggagttttcctatgcccaacaagcagcagggacttctggctttttttattttgcaggaaactgcatctattttgagaatgaacataagcgtcattctctttttttatgcctgaacgcagggaaaggaggattacggaaacaaatgattccggaactggcacgccacaaaagaaaggagactctatgtcagtcaaaagaattaagaatcttgtaaaacaactcaatgaataccgtcatgcctactacaatcaggatgcccctctggtatctgatgccgagtatgaccgactctttgacgaactgaaggaactggaggaacagactggtttcatcctgtcaaattctccgacacagacggttggatattatccggtcagtgaacttgccaaagtcacccatccgattccactgctctcgcttgagaaaacaaaactgatttcagagcttttagatttcatgaaaggacaggaagttctctttatgctgaaactggacggtttgactaccaaactcatttacgaagatggcagactgattcaggcttctacccgtggagatggtgaagtgggggaagatattacacacaatatcccggcatttttaaatgtaccgcttaccattccacacaaagaacgtctggtcattaccggtgagtcttttataccaaccaatgattttgaacgtctgaaagatactctgcgtgatggaaatggaaaaccttataaaaacggacgtaattttgcttccggatcagtacgaagtcttgatccgaagaactgtatcggacgttgtgttcgctttcttccgttcaatgtattagaaggaatggaggatgttcccttcccggacagcagagcctgcaaattagaaggtttaacacacctgggctttggttactgcccgtttttctcaatttcaggaaccggactttcaaaagaatatgcggagaaattcattcaggaattggtatccacagcagcaaatttacatcttcctatcgatggcattgtcatgatttttgacagtctcagctactccaaaagctgcggaaaaaccggacaccactataaggacggcctcgcctataagtttgaggatgatacctacgaaactttcttgcgtgaaattgaatggacaccgaccagattcggagagattgctccggtcggcatcttcgataccgtggagattgacggctgtgatgtttccagagcttcccttcataatctgacctttatcaaaaatctggagcttgtacccggatgccggattcttgtttccaaacgaaacatgatcatcccacatatagaggataatctggatcgtggaaggtataccgacatcacgcctccggtctgcccttgctgtggttccaaaaccagaacctacagccgtaagaccagcgacggtcgcaccgtagaaactctgcattgtgataatccgcagtgcgacagccagatcacaagaaggtttgtccattttgccagcaagaaggcaatgaacatcgaaggactgtcagaagccactttagaaaaattcctgaatctgggctatctgcactcttttcaggacatctatcatctggaggaacaccgggaagatattgtggcactggacggatatggtgagaaatctttcgaccgcttgtgggaatccatcaacgccagccggaggaccagctttgtccgctatctggtttccatggatattcctatgatcggcagaaccaaaagccggattctggacaccgtattttccggaaatttaactgcatttgaacaggcggctgtcggagattacgacttcactcagttagaggattttggcgaaatcttaaatcacaacatccattcctggtttgcagatgaagcaaatcttgatttatggaaaaacttacagaacgaattcacatttgaacaaagaaaggaagagaccattatgacaaaagaaaacaaatttacaggatgtaccatcgtagcaacagggaaactggagcattttaccagagacggtatcaacgataagattctggagcttggtgccaaacctggcagctctgtaacaaagaaaaccgattacctgatctgcggggaaaaagccggcagcaaactggcaaaagcccagagccttggtattccaattcttacagaagctgaatttttggagatgattgcataaccatctctgcaatagatgagaattattttgaggtgtggctgaaaggccgcacctcttttacaaaggaggaatttataatgaatcaaacaaatacaagcaagcgcatacctacacagatcaatgaatttcggggagattatgcttttctaagcaatttctatccggcaccggtctcttacatgggacaaacctatgcaaataatgaagctgcttttcaagcgcagaaaacactctctgcgagagagcaacgcaaattctgtatttttcggatgcataatccttctgatgcaaagaaactcggcagagatcttacattacgcccggactgggaaaaagtgaaagtccggctcatgtatgaaatctgcatgtgcaaattcatgcagaacccggaactccgggataaacttcttgcaaccggagagtccacacttattgaaggaaacaactggggtgactatttctggggcaaagtcaataactgcggagaaaaccagttaggaatcatcctgatggatgtacgtgcgaagctgcagtggaatgcagaaacagcgcccaataatatacctcaatgtctgcaataaaggaaaggatggtctaatagaatgaatgaaaatgcaaaaacaaaattagtgcttgagtatactggcatggatgatttttcctgtccggtatataaggaccaattcggaaagttgtggaaggatattgaccttggcaaagagcctgaaccgaatctttattctttatcttttaaccatattgatggagaaccttcccatcccatacagcaggagtacacatttcatccggctccgtatcaaagaagttcctatgaattcgagtaccggatgttaagtaaattacagtctgactgtgaatactatctgggctacggaaatcgcagtccgtctatcctatgcaatcatagcgttcaaaaccatattgcccgtatgaaagaattatggaatggttttcccacagatcagaaaccggaatggctgacctgggaacagcttcttcagtacgaaaaagtaatgacagaaaccggaatacccgtgaagaactgctcagactagacaattcatcatttatcagaaattaccctctatattatccattcatattttgatataataggaacagttgaaagaaaggagcatttcccatgtatctgaaaagaaaagtttacgatcagcttctggattggaaaaacgataccgtccacagcaccttggaagtgaatggtgccagacaggtcggaaaaacatatattatcaataaatttgcggatgagaacttcaggcacaagatctacattaacctgtttgatttgtccggcaaacaatttatggaatgttacaaaaaagccacagactggactcccggtacaaaacgaccggagcagccgcttcacgatgcttttaaactcttcgatccggattttgaagataccaacgatacagtcatcattattgatgaaattcaggaatcctcagagatattcaaccgtatccgagaatttacccgctattttcaagcgcatttcattgtaactggaagttatctgggacgtgtactggaaccggaattcaaattctccagtggagatattaccagtatccgtatttataccctttcctttaaagagtttttggaagcattggatgaccagctttttcagaagtatctatcacttccactggatcatgcagatgacaccgtaccggaactatatgacgaattaaagaatgtttacgacatctatagacagattggcggctatccaaaggttgtggaaacataccttaacacaaaagacgtggaagcagctcaaaaagagcttgttagaatcatccgcattttcttaaacgaatctatgcggtactttgatgacatcacagatattagtgtttttaccaacatctttttaagcatctgccgtattctgcttcgtgaaaagaaaggattagatgaggacagtataagtgaagaactgcaaaagctcgttacaaagaattactccagtaatctttctaaagcaacctgctatcgtgctatcaactggctttaccattctggaatcatcggtttctgtggcaaaatcacagaactggacatcttgaatttcaaaccgggaagccgctgcttcttcatggatcttggagttgcatattattatctctccagaactggtgctactgtatcaactatggatggctcattgaacgaaaactatgtttacattaacttgtccaaacgccaggaattcccggaagaaattatctttgagacaccggcttttgctacttataaaggtggtgaaattgattttgtagctcagacattgaaaactcacatccgctatctgattgaagttaaagccggtaagggaactgcatctactgccttgaaggcattggaacaggggaaggccaataaactactatatctgaaaggtgataccaaaggcggaaccgttggaaacgtacaaacacttcctatctatctgctagaacaatatcatttttaatcaaagaaagaatacttcgagccgcccatccggacggctcttttcatctatattcttgtatatttattttactaacagcgcatcattctttgaaagaagatatatacagtattgattcatactgatgccttctttttttgagtgttccgccagatcccggtgtaagctgcgtggcatccttattttaaactgtcccgaatactcttccaggcttcccggttcgtgaatctcaatcccttcttccagtgcagcttctaaccatgctttttttgcatccgctgcattttcaactgccctttctatcgtctctccacaggtgatgcatcccggcagttccggataagaaaccacaaatccaccttcatccttatcttccacaatttccatgcgataggacattgccaaataatcattcagtgtcttcatcgtttttcgcctcactttctacaatctgctttaccatttcaacataaattttcttgattggttcgtgtttcggtattgttatcggctggcatcccgctttacggaatgtataatggctgctcccacttctcggagcatttatctcatatccataactttccaatacttttcttaattcatcaaaacgaaggtctttcgataatgagcaaattcttgtcaatagtttatcccatttcgacatctttaatgcctcctatctatagtatatgtggtgtcatatgtggtgtcaatctgtttttcatctttcttggtcaaataaggctgcagctctttcttagcatccgctacaaatgcttctttcctcgcacttaccatatatatcttccagagcatcaaatgcaggatttccgcatccaccacactgcatttcttttgaaccatgcggataaacgggcagattactgtatctgacagcttttcccctttaagcagcagctccccatccgttccatatacttcatacagacattccagaatactccccagatctgtcacaaatcggaaggcgggctttacatatttctttttggcttccatcatctatctcctctacatccgaacagtcagcccgccgaggcgtgtcttcggaagtcccacaagataccagtcctcgtccatttcaatccgaaccggaatccatacatcccttaccttcgcatcaaagcattctccacaatgcagtcccccataataggattcaataccaaaccggatatcatatcttcccatagccggatcataaatcaaagtacctattcttttttcactcatattgctttcctcctgaaactctttgttctatataagtaatagggctttcattctaggtattggaaagttccggatatttttcataaaaagttttacgataccggtaaaaggtagagtgtgtcattcccagactcttccgaagctgtgtcggtgtcatttttccggaaataacgctctggaagttctcgtcaaaggtttcctgcttcatcacgcatggtcttccataatcatcccattcgccccgcaatttcttcgcttctatcccttcccgctgtcgcttctcctttttctccagctctgcctgcgccatagaagcataaagctccagcatcatgttattgattgtttccagcatcatccttgccatcgcattatccatcacagataaatccataagcgtagtcggcagttccagaaccataagccgcactcccatattcttaatccgctggatctgttgcatggtgtcatgcttgtttctccccagtctgtccaattctgtaacaatcaaaacatctcccggccgcaggacatcctccactaaaacggtatatctcggacgattaaaattcttccctgtctcttgatccgtaaaaatattcgtaagtgccatctcatgctcgttacagtaccgctcaatttcctgtatgccacggtcaagatgctgctcctttgtactggtgcggtgatatccatatatctgcatccacatttctcctttccctgtcccaaaatatccacacttttgttggcatatctcaaaactgtgtgtgtaacctttttaagatataatccccctttccggaacgtacttctaaaatgtatacattttgggatatgtttcttttctatttctgtacgtaccagagccgaaaagtgcaacaaatatgacaaaaaactcccagaggatgttactcccctgagagtggttgaaacttatagcccacacctcggacggtgcggatgtaattccagttccgtgaatctacttttaactttttacgaagctggctaatgcagcacataaccgcattagcacagtcaatcggttctttcttccagacattacgataaatctcctcgtgagagaatacccagccaggatgttctgttagatattttagtaccgtaaattctttcagactcaattcaatcttttgatcattcataaaaacagtatgacagcgaatatctatctgtaggtttttgtctttgtaatgcaatttactttcctcctaatctgtttcaccttatcacagctaatctaaaatgctattattagactgccaaaactcaaattcaaaaccagagcaatgctttacctgcaaatagtctggtaatagaccagtagaatcgcaatagctgcaagagccagaaacggcaaacacataattaccggggcagagtgaagtgataaataagaaccactgattttttagcatttcagccggatatacaagccatccccatagattggtgaccgttactgttaaaattacagcactgcctatatatgtggcagctcctttccgggtaaagttaaagtcgcagacctttacgacctacggcttaatagtacgaaaagacattaacttttctgtaaaagaatttgatgtactttatatgctatattctaatccagggatggcttttactaaacaacagatttatgaagcagtttggcatgaaaaagcaaatggttatttccacgccgtggaaaacactatttttcaaatacgcaagaagataaaaaagtattccagcgacaagaattacataaaaacagtagttggatatgggtataaatttgaagtttaatctgcaggatataaggagcaccgggtttgagggagattccccactaagaaaatttctatgttctggctacaaagccggaacataggtcggcatccatccctgtttcttcccaatcctgcagacctaataagaaatcagctagtgacttcttcatcaaaagtctttttttagagaaataatccatttttcaatagcatccgccaaaactatctgctgttgcaatactgccataccagtcttagggatttccggatcattctctttctctcgaagattttcctccagataagtttttaatatttcaatattttcctcaatactggcaatacatgattgttgactttcaggcggtaacttatccaaatttacaattactgcattaaaatctaaaaaaaagtgaatgggtttagaggctgtttccatcataagctttacaaattctttttcgccttcatctgttaatgaataaactgctttttcaggcatcttaccttctttcacaatttctcctttaatgaagcctttttcctccaactgaattgcttttttgtaaatggatggtgtactgatttttacccattttgatatattacgatattccactaatttttgaatatcataggctcccatcggttcctttttcaatattcctaacacaattaaatctattgtagccatagttcacccactttctatatccacgaaagctataaaatacttacggttatatatactgtaatttatagtatttgattttatacctcttgtcaaggaaattgcaggatacacgcttgacaactactataaattatagtagtattctctcacgtagtatactataatttatactactataatttatattcttaattgaaaggagtatttgaaatgaacaagaataacaacaaaatggatttattaggaaatgcacctgttccccaagcactaatggctcttggtataccgataatgattggtatgcttattaacgctctctacaatttggtggatgcttatttcataggaggacttggcgagagtcaaatgggtgcaatttccattgcgtttcctttaggacaagtagttgttggtttaggtctgatgtttggcaatggtgccgcctcctacttatcaagacttttagggcgaggagatagggaagctgcaagtaaagtcgccagtactgcattatacagcagtgtttgtattggcgcagttattattatcggaactgcaatttttttgaaacctattttaaccatgttaggtgcaacagacacgattatgccatacgccctttcttatggaagaatctatgttatttcatgtattttcaatgtatttaatgtaacgatgaacaatatcgttgcaagtgaaggcgccgcaaaaacaactatgtgtgcattattattaggagctgtattgaatattggtttagatcctattttcatctatactctcgacatgggggttgctggtgcggcaatcgctacagcaatttctcaaatggcttctactcttgtatatttaatttatgcattacagaaaaaaagcgcttttacattttccattaaggaattttgtccttctaagcagatcataactgaaattctgaaaatcggtatacccacattgactttccagcttcttacaagcctttctatcgcattcataaaccgggaagctaatatctatggagatgctgttatcgccggaatgggcgctgttacaagaatcacttcaatgggaactctggttgtgttcggcttcttaaaaggtttccaaccaattgccggctttagctatggtgccaaaaagtttgatcggctcagggaagcaattaaaacttctatcttatggtcaacaatattttgtgtagttgtgggattgacaatagccctattttccacacagattatttcgcaatttacagaaggcaatacagagatgatttctgtaggtcaaaaatcgctaatggcaaatggattttccttcttcgtatttggattttacacagtgtattcttctctgtttcttgcacttggaaaaggcaccgccggattcgttcttggggcttgccgacaaggtatttgctttgttccgatcattctgttgctcccatcattctggggcataaatggaatactatatgcacaaccgattgccgatgtaatttctgctattgttactgtgtttatggctctacatcttcataaagaactggcaacaacaaaagagcattaaagcatcaggcaacataatagatcaacaccgtctgccgcttcgaactgaggcaatatcacccttcaaaaaacaatcactcccagaggatgttactcccctgagagtgattgcagcctttgtttaagataacttactcaattatctggaatctctggatacactgaagcaatgtacttaccagttcctgatacagatcttcatcaaatctgccattcacaatcgcattcttaattaaaagcggcttatatatctctaaaatcttcagtaccgcatctgcatttccttcttttgcctttaaaagtaatcgttcaaaattcattagttttcacctcccatcaccttgcggatcttccggattgcataataataaatacccttgcatcgctcctctgataacccgtttagcctgctcatttcctcaaaagtacgttcttcaaacacatgctggtaaatcagcttccgttcttcatcccgcagcgtatgaagcgctttcatcagtctttcatctgacatcttattccattctggatatttcccctgtgcctcctgcaataaaagctgctccctcgtttggttctccagcaattcttcgattacaattcttgcctccatctgtccaatatcctccaacagttcttctgcatcagccatctggattttcttctccagataatcatgtcgttttccacggacaaactgtatcagatatgctgtaaagtgattttgtatctttgatcctgtatatgtttttttgttcatttgttttatcctccgaaattttttatcacgttccaaaaaattccgaggatggcggtgagcggcaacaaaacgtgacactgccttcattttttcgaaaaaagaaaggctggaccactctattcgtagtccagccgatacttctctttctatgtaattgtgtaggatatgcgatgatagtatctcatatactgcatattctaacttctctccgacacattgtatggataagatttttttaacagattcagttcctctttggcttttatcttatgctgtccattcatgtctgtcgtacttacttccatgtttctctatttgtgcatgtgttatcctgcttatcataacgcactttaacgcatttcgtatagtgttaatctacgataaaatatatgcattaagtgaggtgatatagatggtgaaaaaattattgggagatgcagtcagggaagaacgtctccgccgcaatctttcgcaaaacagccttgcggaacaggcaaagatttctttacggactgtctctgatattgaaaactatattggcaatccacagttggaaacactttatgccttggcaacttacttacatatttccatagatgctatattttctaaccagaaaacgaacccggattctaccatgcagcaaatcatggcagaactaaattcctgcccggaggagcagaaacagcttgccctttctacactgcgtggacttctggatggattcaagaacctaagttaaggctctcccgtatccttcatcatctacacattatacaaagacaatctgtgagtaatctgtgaatagtctgtgagttttctgtctattcccattctgatacaaagaacaggagagtacactgccataagcatgtgtatctctcctgcttttttatgccctgcgaaattcactgatagcatccactacattctgtctcatagtctgatccatccgcagcggttcttcttccatcaaatcaacttctgtgggcatttctctatttatcttagaaacgtcctgcccttccaatacctttcttacttcttcccggatgatttgctgcatcattggccggagcatatccggttccatgcttatactgccattacctgtctcatccgttcttcccgtatatgccagaattgccgcaacgatcagttttgcttttttctctgtcgtattcagaagttctgtcacatacacgtgacctggatccgacttatcaaaaccaatagtgaatacaaacggatttttctttcccataaaatcacactccagcctgtgtcatgcgatacaaaagatcatatccatcggcatttgctttcatatcccggataaaggtatgttttcccaaccggtctgcctgctccagaaatcgttccagaagcactgctccgccgccgataaacaccgtataagtagattttgtatcaatgccccgctctcggatgctgttcagaagatcggtaacaaaattctgaaccatggtttctactgcctgtacaacagcttcctcataatactgcgtttttcccttgatgatactgtcgatatctgcctcctccagaagcatgtcatattcactgttaatactggaaatgatatcgttatacatggtaatcacacctttttccagagaatcacaataatccatatccggtctgccacttctcatcagaagataatcagaagtaaatccgccaatatcaatccctacgactttcggaatctcacggatttccatcatcctcgtcatcatggctgcataatcctgcggaaacgccattacattctgtatacagaggtgatagactttatcgttgaagcacagttcctgcaccttcccgtcccctttgaaatagcgttcatatctctcacaaagctctgcaaaatgcttcggcggaagcccaatcggaagttccacctgaatgacatcctccggctggatctggcttttctgctccagctccattgcaatggcaaataaggtcagaatccagaatcggttccggctgtcctgcgtcttgtccctctggtacggaatccgcttctcactaagggtataatactttccctgatatttcagatacttctctcccctggcaggctttttatcctgttccgtcagtcctgtggtaaagataaaatgacaggttttcatgttccggttcccgtgatccacggctactcttaattttttaatcataatgatttcactcctttgtatttgatacttattctgtacgtaggaggtacctagagtgcaactctttataatccattttcttattttaccaatcaaaaaattcaaaaaacaaaaattaaaaattatcttttttaattttttaaataaatgcaaccgttacaatatttactgtgtatcttattacaaagggaaccttggaaaggagtcgtgtacatatatgaaggcttataaaaaaataatcagttttatcctaacactcgttatgatgctgtcgctaagtgttaatgtttttgcagcagagccgcttacagatgaccctaatatgattgaatggaagtacactgtgtttgctgacgaaagcctgcagaaagttgttgaagaaggtgttattccaaatgcatatgcccgatatacttggcgcggaatcacattgaaaaatggcgaagtcgccatattaacaccatcaaataacagtatgggactttattgtaatagcggcagatacataactataaattacactttgagccgttctgcttttcatcgttcaagagtacgcgcatacgtagctggaccttcatcagaatttgtgcgtgagattacagcaagtggtttgcgttcaggatttacgacacaggcaacagattactattacggcatggtaactaatctgtcctctgatgcctttacaatcaaatcattttctattacattttaatagtggaaaatatttcaagtgctggtgagtacttatcctgattttaattgaagctttttaacttggtttctcggttcccttttttgaaaatacacattcccattattaaaccactgctatagtattcactgaatttatgaggtagaagcatgttatttaacatagatctcttaaaagcggtaatctggaggtaaattaaatgttgcttttgcgggacttcagcataccaattaactttagtataaggacaggaagacctcttccgtacaggaataggtcttcttgctgtctccgtgcatgctttaaagtataaataggctttaatctggatacaatttcaactgcatcgttgatacacgctgtgtttatctcgtttactgtatcattcataagaatttaattggttatgtttattgtgatgatagagtagcctttgttttgaacatcttccttgaaagatttgtaaacgatactgtagattatcatattcattatgtcggcgtagattctttagatgaagaatgtattgaatgcagaaaatactctgattattgtgaacatattttacctgctttctggatagatgacgatttttgtgaataatgaaacactggtgtttggttattcaaaatttaagctgatagatactggtgttaagtatattaatccgaagcatttttccgtaaaaaactttgtaaagtattgcagattcaataaagagtgaaattacagtaaaataaaagatagttttttcgttcctttgttatgccattgttctacgccggaatcttttctgccatctccggcaggcacttctcaaataattcccgatatcttcgatacccttcatcccggagtggaccttgcagtgatgtcagagaccaaaggagaagctcttcctcttccacagcatacggagaggtatagacaaattttttcccgtcaaaatgcggttttgataacttcagtatttccgtaatctctccttttgtttccgcctgcataatcatttccactttcttccgatggaactcgcagacgatgctctccagaaatccctgcttcagataaaattccgcccttctataaagttttacaagagcctccactctttcatcaaataacttgtccttttcactgactatcatctgtgccagtgcgtttgcatgttccataaccaatgctgttcccattacatttcctcccataataaaagctggcataagaaatttcttctcacaccagcacgattcttttattcctctgtgatgatctcactgcttaattttccatgtaccagatagcgataattccgtctggaattgacacaggtagacagcgtaactatccgatccgttgccgacagctcggtgccggtatcataatccctataagaagacaccgtatccagaaacgtctgaaaatcttccgcttccgggaaatgatacctatatccctcacttccggttcttcccgcatagcaggaaaagatacgatacttgaggatcttgtccggcaaatagagataaaactccggatgttgttcaaatagctctttgtcttggtacttatccagagttccgaacatgctcccgtttttcatattatgcccgtacacgatcgtattctgatccgtaaagtccggctgattatggcagtccacaaagatgctcccgttgatattggattctcccgaaaaaaggtgatgaagataatatgcattatctttcccctgtaccaccggataactaatatccagtgccggaatctgaatccacgctatgacatccggattaaccgcttttaaacctgcaaaatcaatttctagatacctattcttaggttcctccttttctttctcagactccggtgattcttcttcctctggttcctgaacatattcctgcagtttctcgtaacttacgtcccctttctgatacttcagataagcaccaaagagttttcctgccgctgcgagaaaaacaagcaacaggcagataatgagtcctgcaagaaccgtatttcctttttttctcatgattgttctcctttcggaagagccgaagtctgtgccccggttccttccttctgtttgatggcggctaaatagtcatcaatccccttgtgtttcccgttccactccccgctctcgtccatatcccagaccatccggttcatcggcagggaaagctcccggcagatttcatagaccttattgcagccgttctggataatcctccgtttctccgccttatgctggcagataacaggggaacgctcaaaacagaccgcacacttactgtcatgcttattgcaggctactttcatcttcttatccatgtcatacgcctccaaaagctgtttcatcccatatcctttcatccgctccagcaccggtttcagattccggtactggttcactccggcaacgcacacaaaggtagcgccggacagataatgggctatggtcccttttaaggctccttcggtcagatagacacgttctgcggcaagatcaccgatcacatgtaccggacttccggaggaaactccctggtcataattgacactggacagccagatatattttttcgtgtcagtcacatgatctacccggatctgaaaaccctggatgaacccgtccaaagaaactatgggaatcaggattcctgagttttctgctttgaagttaatcgtccagtttccgtctgtatcccggtagaatcccggcacgcctttcaccatatatccttcttctgccagccttttgaccagcttcttcattccaaacagcgggacactccggtaacgctgtgcttcgatctgttccggttttaatcctcgtctttgcagatcctcctgatgcttcctgttaagcgtgagcatggacagcattctctgatacgtccggtggatttcctctatgggtgcaagctctgccgttgccttttcttcctgtaccggcgttgctttgatataatccgtccggtattctccttttcctaatgcttcccggatctgctgatttgcttcggagagtgtaacattgtgcaaatccgcataaagcttcagcatccccccggacgcatcacagcggttgcaccggaatacattcttttccacattgatattcagttttccatgcgtctctccacaaaacgggcagtcataatagtttccccgccgctttctgagatgcagcacctgcaccacatccagtattccataatcaaacccagacatatcataatacatcccggtctcttcctcctttcccccgcagaaaaaagctctctgcggggttcttccttaaccagccatcggcattgctttttgtaaaattacctttgctgccgccggaaccagattgttcggtccggaatattgctcggcaaaccactggatcgttgacgggctttcaactgccacctgtcccatggtctttccgccgtattttccctttcccggaatcacagtcccgactgccatttcatagttcatgtgtttcatcagttcttctaccggaagggacgtatccagattctgtaatgctccctgcagcatctgtccggtctttggcggcgtagaggcagccggagcggaaccgtagccaggcatttgtccactgccatggtaaatggtgcttcccgccgcctgtgcctgctgatagaactgattcatcatctgctggcctgcatattccggctgacctggcatctctccataagttggcataggggcatttggcatgacacccgaatccggcatggctgcattttccatggcacctgaatccggcatctgtggattctgatatggaattccggcatctacctgtgcaggatcattttcctctcccacatccgcaaactgcacaccatatccggcatccgataatgcccttcctacggctgctgtttctgccatttccagaaatttgtctccaaacttcgggtcatcgctccggaatttctgcgaaaaggaattggctacataattgtcttcctgatcacatttatccagatagatacgtgcttccacaactgccatattctctgtgaaagtgataatccggctgatgatctttcctgcaggattgaccagacgaaaccagagcttccggtatttcacatccagataaagctgctcctcctgcccttcttctccaatctttcttgccagttccatcggatggaagccatccacacggtttaaagcggcaactgcctctgatttcttatacaataattctttcattctctgctcctttcatttagaaaagcagacgttcccctatataagagtaatagtccgcttatttcaaaaattgaaaaatatttttaaacaacaagttttaactgctccatttccggtttctgttcactctgatactgatcgtaatactgtacgatccgctcactcagaatggtgttccttgtcccgctgtcatccgtatggattgcctgacagactgcagcccattcccctaccagataaaccttgcttttcgctctggtcactccggtatagagaatattgcgcttcagcatcatataaaaggcttttacccaagggatgatgacaaccggacattcggaaccctgtgccttatggatggttgttgcgttggcatgttcgagcatttccatctggtcagcttcatattgcacctgccgcccgtccgggaatccgatcactgccctggcatttccatcctcatccgtgatacagtccagtatcttgcccagatcgccgttactcgccatctcggtatttttattctgtaaaatcttatcgccaacccggaacacctgactgccgatatgcagttccttcttccctgcgattggcggatttacaaaatcctccagagatttgttcaattcatccactccggcagcactgcgtttccgatacggagtcaggatctgtacctgatccatgccgttttttgcaatctcgtccagataaatcctccggacaatctctgccgcctcatctgctcctttgcaggcaatgaactgaaaatcctccccaaagctcagattagtcttattctcctgcatcagttttgcattataagggatgctgctcaaagcgccctgtcggtaaaccagatccagtaccgtgaccggaatcagcccgcaggcaatcatctgccggaacacatccccggctcctaccgatgggagctggttcttatccccgactaaaaggactctggcatgtctgcttacccgccggaaaaattcataggcaagatgcatgtccaccatggacacctcatctacatttaaaaatccggcagacaggtactcaaaatccggttcaaaatccgtatcatctcccaaaagccccagggccagatgcatcgtggatgcattttcacagccggtactctccaccatacgtcttgccgcacgtccggtcggagccataagctgtacctctgacctgcataacgcctgatggatatagagaatcaccttgagaaccgttgtctttccggttccgggacctccggtaataatactgatgggatgtgcaaacaccatccgcactgcctgtttctgtgtttctgacagcgtgatccccagtgtcttctgtgccttttccagctccagttcaatggacaacggaaccggcttttccaaaagccgtctcgctatcatggaagcagtctgcgtttcttcttcatactgccggatagaatagatccgttcttcctccactacaatgcttttttgcagcaccagccggtaaagcacctgactgacatcctgctccgatactgccatgacctgcagatcccggttcagcatttccagtgcttccctgataacctcctgacgctgcttaaacagatgtccatctttcattgcctgattcatgatatgtccgatgcacccggatatccgcatgggatcattgagtgcacagcagcactgtcttccgatcgcatccacagtcagaaacccgaagcctttgactgcactcagcatgtaagggcggtgccggataatatccaccgattcatttccgaatttcttcagaatcatattcacttttttgggtgtcaccttaaaaggcgccagaaacgtcatcagttcccggaacacctggttttttccataggactccacaatagcagaaagcttcttctcggaaatcccacggatctttaaaagttctttcggactgttttccatgatttccaacgtctgaagcccaaacttccggaaaatagtatctgccatcttgggaccgatgcctttgactgcaccggaagaaaggtatcctaagataccctcctttgtccgtggtacaacctccatgaaattttccacctgatactgggttccatgctccccgctctcccatctgccttccatctcaagctcaatctcgtctgtaagcggaagaccgaatccaatcgctgagaagccgatgatattccgggatgccagatatttgtctctggctgacagggggacagacgtatcctgtgtggtgaatatggcaatcgtatacccattctcctcattccggaaaatcttatgtttaaatctgcacctcattgtttatatccctccagctttttacccgcatccgttcatttagttttctcattacgccgcctccttcttaattcggaaagtacggctctccgttgtttttgtatattcctcatagatatccggatgctggtttttcagcttctccatctggtctttcccaaccgaagtacgtctggtcggattataggtaatacggtaacggttcgtaccgtcctccagcactgccttgcagccctgccccagctgttccacaaaaggaacactgattgcccgctgttctgcttcgatttcctttttccgtttttccaactgtgacttttcctccgaaagggtaagatacttctcaagattttttgattccagaccggaaagcacaatttccggaatagatttgtctgcaaaaccaccataattacggatatttgccagaaccagatcggaattcccgttatgcggcggtactacatttttcaatacatgttcctgccagaaatacgtttcctgatcaatgatgtcttcttcctcaatcagatcacgctcaatggtgcgatacacaaactcattctcgttatttccatacaggcatgcgataaaggctttctgcatattcatcacagacagataatgccttacctgcagcacataatgagctggaataccctcatcagcccacttatctttcgcattataattgcaggttttacattccagaatcgcaaatgtcccatccggcatacgaacaaaaaaatccacatctgcaagcatgaacggatataatggatgccggaacatgacacgtaccggaaatacttccagtccggtctttttggaaaagatttctgccaccagatcttccagccggtgtccgacttccttggcaacccagttgctttcctcttcctcctgaatgaccggctgcacacctgttttgttgtaaaacagatcccggatagtggcaaatggagagatccccatgattgccgctacatcactgccgccgattccttttttgcggtattccaaccagtcttctcttgacaggttactgatatccacaaccttttccggtgtatactctgctttgttattcattccaattcctcctaacatttgactgctccataaacgtcatattttttccagtcttttataagcgccttcgtaatatcctcctccagcttcaggatgccctgtccggacattccttcacaggctgcaaaaaaggaggcttcattcatggcataataaagatcatgtgccgtacaggcaccttccccgttctgggatacaaataactccaccacctcattccggatcttctgtttaatgccaagttccttcatcagcagcttcaggcagttcaccggattacggatctcaatgtccataagctgagtaagattcttcatcgcatccacatagcgggcgcatacctgctccagatttttccggaagtccagaatcgttgcccctttatcgtgagccagcttgattggacttcccagactgataacgccgtttggtccgtctgtcaaaagcatcggatacagatttgcaccgctcgctgccacgtcagatgtggtaaaacgaagtgccggtgacaggatcttctcatccattccgtgtgcatccagtgcttttcggtaagtatccagaagttcctgacttcctccgagcttccacatggcagatggacatggtgcttatccacatgggtgcagacaacaaaggcatggtttccttttgtgagcttcagtgccagctccctgccgatctgattagcttcttctggcgtaacttcgccgggcttaaatgcctgacggagatggtaggcgatcacatcatctgcaccctgatttctgccggtcagatttgcatactgtcgtttggaaagaagaaactctgcatcagcaagccgggtatcacactcatagccataaatgaattttccaaaatcggttttctgcggattttctacataatcaataatatctgagatcgcagtagagatattccgaccttttcctacatgcagaggcatcagtcttgtggtcgctattttcgtcacctccttaacttaattccaatcagagaagttataattgcagaaaaagagcggggctgcctatgcgccccgccaaatctgcttaaccaaatataaaatcctttaaggcactgtttgccccgccaatgatccctaccagccatgcagccgccagaggcagaccgtatggactgataagaaaggcgatcataagccatgcaagacccggcaaaaatcctgcgacaaagaacagcaccaatgccgccagaaagatgatcccagaaagaatcccaagtaccgcaccggaaagaaccactaaaaatttacataccagataaagaatccccgtaaccagcataaagggaagtgccagtaatttacctatcaaacgcatacgctttgcctcctttcagaagggcatctgcccttataaaaattttaccgtgacggcaaaaagaaagcaacggctttccggctgtttatgaaatgtttgcaaatccccggatcagtttatccatgccatcttaaaggctatttaaacaatcgaaaaaaaagtgttatagataaaattggcttattatattctatatttccgatttttccatctattttctttagtaattcttttacaatatacaatcccaaaccggaaccacctttggtgcgtgatttatcaacggtgtaaaacttgctgaataataaatttatatccatctcatcaagggattgcgttgaatttttaatcatgaacacgccttcctggttaatggacacttcaatatagttatcagaataacggattgcatttgtaattagattttcaataatacgtttacaaataaggttattgccatatatccacaccggagatttttctgtttgaataatcggctggatttccccaaattcataatacttttcaattaagcaatctgtaacaattctatttatatcaaccttctcacattcaacatcaaactgctcattttccaccacagataaatcataaaattcttgcaccagatctgtgagataatctgtttttgctttaatgatttcaatatattggtcttgctcctgtttatcttcacattcttgtaaaagtgttagataaccctgtatagatgttaatggggttcttagatcatggcttatattagatatagattgctttaactgatcttcttcttgcttaatttgaacttgcagtttcttatgcagggtatctttttgattgatcgcataagctaactcttcaatatctctatttgataaagatactcttatttttcgtttttcctttatctgcttatttatattgcgaattgttctagtaatagaaaaaagggaacatgctaatatgaatatagaacatatcaataaaaaatagaacatatccgcatttcccctttctgttgtaattagtgtatttcttgttttctcaatatcaatgctgacaccaggaatgtaataattacagttcctacaaaataaagtaagatattgatttccaaatgatttaccatattataagaacacgtattcatccaataatacatcggattgatttttaagtacgttagaactcgccacgattgagcagacatattatcccatgtcatcatataaataagaggtccgctaaaagtaaataatgacatagttcctaccacaatagctgtatgcttaaatatcacacacagcatgagtgtaataccgataaaggctcccataaccatgcaatttagccctgcaattttcaacattggaagtaattgtatcggcacattgtattttgtacattcaattataaatgcaaccataataaatgaaaaatataaaatgatgctggtaacagtaatcacgatatactttatatagtgccggcatttcaatcgtacacccgatttttgatcgttcatattgcagattatcattatgcccaaatagaataatttctccttcacttttaaaattaagacctgtcaataatctgattagcgttgtttttcctgctccattttcgcccacaagtccatatatttcgccttttggaatagttaagtttacattttttaaagcatagaaatctttatattttttgctcaggttttttgtttcgcatataaattttgtcatcctaaacaactcctttccatgccactatatatgataactctaaagaaaatctaaagattatttcattttatatccaatcccccaaatagtttgtatataatcttcatttgtaattgatttaattttcttacgaatatgactaatatgagtattgattgtatcgtcatcatacgcataaggttcattccaaatggattcatataaattttgttttgaaaatattttctgtgggtattgcaatagcaattctaaaatgctcaattctgttgatgtaaatggtactaatactccgtttatataaaccaaagagttattgatctttatatttttgtatatcaaagtattattattttgataaggattatcgacagtccgttttaaatttgcctcaatacgtgcaagaagctcatacaaatcaaatggttttgtcatgtagtcatctgcccctatttttaataattctattttggtctgaaccattgtttttgctgatacaacaataacaggagcgtttgtaaattttcgcaatttctgtaatacatcatccccattcagccctggcaacataatgtcaagtattatcaagtccggaacaaaagatttgcacaaatttattccttctataccatttaaagcatattgaacactatatttattattttccaagaattttttaatcatattgcaaatatctatatcatcttcaataataacaattttacacatttttatttacctccatgccaaattattttatcataggaacttatcgttatccacataataatatcgtcgataaaaaactgttaagaataaatgaacccatatcaagatgccatttcaaaattagtttaatattatgaaagatttgcaaatccccggatcagtttgtccatgccatcccaaaggctgtccagacgggtgcggatgtcatctatatctgcggcataaatattgccggtctcattggcccgtctggtatattggtttaagttattggaacaaatgcggagaagccggatcatttcctgaatatctcccatatcaaggtgaatgatgtaaccgtctacggccatctttcgcagatatgccgacaggttggtaatgccaagttccgccatgcgttcttttaccagttcggcctccggttcggacatgacaaattcgacgcggacggattttttgttatgcccgcccttcatcgttccaaccctcttttatgagatgagacctcctgtgttgaaaccaccgtctttgctcttttgagtttttcccgcagggtggtcttttccagcttatcaagatattcctccagatttccggctgtcgcatgatagctgcgtttgaagcgttcccgttttagaatcatcatcagctccggctcattttccggcagataagtcattgttttaggggctccatgctctggcataaaccggttcataagctgtctccgttcctgatagggaatcgtgataacatttccatccgcaaatgcaacggctacatttccgattggacaggtcagctttttcatccgttccacatgttctctataatttagcggatagagattgccaaatatttttccgtccctgacttctttcaaagagatggcataagccaaaacgggatcatttgtctgttcctggtaaaaccgccacactttattttcatggcttccatccagataaacttcccgttcgcgcagggtataggttccgcaagggcgtgacatccaaagaagctgtttatcctctgaacggtctgacacagccagttttgaaatcagttccttatccaggtcaaagtcctctttataatgttgggtatgaagatctacgatacgggaaatagcacccaaaagatctacatcctcaaatcttaccccggccatcagcgttccctttccggcacaggagggatcatctgccttgcttcatgctccggtttgtctgctttcaaacggtccatcaaagacggctttgcttccggcaccagctcccggatttcttcatccgtctgtccgtctgtcagatccgggcgcacaggaggttcgttgttcagcctgccatccagcatattgtagttcccggtttgtccttcctcataaagttccgcattgcgaagataactttccggcgcctgaaacggctgtccggcaaacagaatttctctttgggtggtaaactgtgcaaggaccccattttgcagtctcgcaaattcttcatactggcgcaaggtaagccctcgttccaacatttccgtctgggtatgcgcccagccttctccataaagaaaataatacatatcgggctgatcacagacaaaacacagggaaccgtcctgattgtcatagtaagatggctgcatatcctggtaatggcaacattcctcacgccccaaatacacacggttgtccgcacccagcatagcgaccatacccgcgtaattactatggaccgcagagcggatttctaccagcggatctgtttgagaaggaatctgtcggcccggaatctcgttttgtttttccgctgcatcatttcttggtattacttcttcatggctgcgcgcatccagttccggttgagatgttcctttccgaacagcgccgggttccggttctttttctttcacatagtatcggacatttgctgtcgtatgctcgttggctgcataagacacatcagcataacgccggaagccattcctccggcaaaagtaagaaaatgtgaaatcaggttccacataagcattcctcctaaaaataggtaaagaaaaacgcccacttcaaagtgagcgcatcaacaggtatctattttgtttttggtttcaagtgatccggcaggacgatctctccaaccgggatttcccgcagttcctttttcatccggtgggtgaagcggatcgtctttgccgtaccgccggtttcccgtccgtcatagacagcaatcactcggtcggagtgctctaccatatagcggtttctgtgggagtagacacttggaagatatttttcctgaatgacaacaacatccgcacaagcctccagcagttcacgggtccttgttttcttattcaggctgtccagacgtttgcagtaaggaatcactgcaatcagctccagcgccggatcggtctgttttctttccagcaccagctctgcaaaatactgatccacgccatctgcaaagccgctcataaaacaggtgaatccatctgtaacggcagtatcgatctcatgttccaaagcggcttttatcttgttgatctcattgtgcggcaaatccctgtgtccggtaacacagcaagtctttcctttcatcggtcattcctccatctgataggtaaaattcttcacttttcacatagtaatagatttcatttagcaagtcaacgataataccctttttccatttgcgaataacaaaggggtgtaaggtacaatctattacagaatgggaggtgaaggcgatgtatgaagattttgtcccggaacgattagcgaagctgcggacacaaaaaggagtttccgcacgcgatatgtctttatcgttaggtcaggcaaacaactacatcaataatattgagaataaaaagtcacttcccgctatgcagtcctttttctacatctgcgaatatctgggtgtgacaccgcaggaattctttgatgaaggaaatacctacccggaaaccttaaaggaattcattgcagaggcaagacagcttgatcctcaatccatgcaatatatcctcggtattatgaaagaactcaatagcagaaagtaagcggtcacggtaatggccgcttttttcgtgactttctttattatattttataatgttctcgaaatgtccgctccctataccgataagtattcaaaaactgttctccaaacagcctttttctattcgccggtactgccaaagctgccggttcctcgttctgttcccagatcggttataaaatccgcaatgacgatcggcgtgatcacaagctgcccgatacgggctcccttaaaaagagactgcgcctgattgcttacattgctgatgatcgcatgaatctctccacggtagccggaatccacaggcggcagttcacagaccagaccttttaccgccatgctggtacggggaaagatatatccagcatacccatccggtatttccaatccaaagccaagaggaattttggcgatttctccgggctgtaaggtgcagtcatagggcagataaacatccgctccggcatcattaccatgcggacggtaaggacgctggtgctccggcacgccaaaatcaatcagttttattttcatcggcagcctccttcccaaagagcaggataatctttttctaaaatatcctctggcgtcatatctgccaccagttttcgtccgcaggtcattttcccttccagacatcgatccatctgacagaaaggtccggtcagtgacggggcaaacaaggcagggcttaggtcataaagttctttccagacctttaacagcacgatccttgtttcatcagtatttctccggcatacccgctggctgatgatatgtttccactgataaggggtggcgctgatgagcagtacattccgtaatccctggggcgtggcatagccggccgcatcgtgcccgcttccggcagtgcacagggcttcataacatttcatgctttcatgacagctttttaagtacaattcccgtaccactgccggagccgtcataatagaatacgggacagcgaaatccgcctgtcccgtatagttgctgtactgcagcgatgcactcataaattttacttcgttctggtggcgggtgatctgcgccagaaaacgcctgctggcgccgacaatggctaccgtgatcaccgcaaatttctggatggtaggatggggaagcgcccccatagctgctactgtctgaacgctgaatgatttttcgtagagatccatcagatcgtccattgaggcaatcttatgtccctgctgggtaagccttgccgcaaagaccatgtttttttctgcttccaccaccgcctggcagttcaaaatttttacttcgattcgtttaattggtatgtccctcctttacaatcgctttcagtaagaacagatagttcagactgtctgtaatcttttcgtcccatgtgtccatcggataaactgtttcctcggcaaagcacatatcgtacagagaaacaatatgctttgccagcataccggcaagggcacgctggggcgttgtatgctgtaaagctgccgctgccttaaatgcaatcagccggtccggagcatccccggtgtattctttggtttttcgtttcaaggtatcagcacagagccgtacctgttcatcaaaaacggtattgacttcattttgtgtgataatgatcacctctttccttaaaatggcatagaaaaaacgagggctgtatcaagtcctcgtttctctcaaattctgattactccgaaatacggtaatgggtatttttgcctttgccttcctgcacgatttgttttctttctatcatccgccttaatagtcgtccacatgctgtctggctgatttccagttccttttctatatcttttcttgtgaaagtgccttgccgctttgccagattgattactgcttcttccgctaagtgttgttcgggtttatttgcagcctgcttttcctgatcggcattaacattcagatttggaagaatgatcttaaaagcattgtcggaaatctcaatcttaggctcctttccggttcccgaataggcttctttcatcttcagtattccggttccgtatgcttcaatcaattccaatcggtaaaagacatttgccagtttcatgtttcggcatacggaaatgcccatcaaaacatcgttcaatgtcacaccgcttacaagtcctccaatcgaagtaaattcaagccgatcttcgtatagactaataaaagtgcttgcccggaaagaatattcacgatgcacaagcaggttcagaagtgcttctctgaccgcagtttccgggtaatctctctgatcgatccggtataacttttgaaaagtggaatgtgtctggtttcggaaatcaatatagtcataaacttcatccatctgttggaacaaagaaccggaaaattcttttcgatccttaaactgattttgtgttgttccctcaaaagcagccaccctaattgtatgcacacactgatcggacaacaaaagtccaagatttgtataaactccatcatgggtcataattcctaatgttttcatctgggcttccccaaataatacatttcttttggaaaattctttcttggctgcctcaaaagttaaattctgttccaacgaccgcatttcctcaaaatggtctccgtctgtctccttgatcatacggcggattgcagtattggtagccggtacagacgaatatccctgacgaacaaacacaccttctggacgtaatcctttttttgcaacataataaggccgttctgttccttgctgaatatcaacagcaacaatctgtttcccatcttcattcaatgtttcataatgcaggaacattgtaagatccggtttgatagcatcccgaaccatgttgctaatctgcaaggcagttccatccgggtcctctacgccaattatggttccatcatcctgaaccccgatatacagttttccaccttcacaatttgcaaatgcaattatttccttctttatgtcatccactacaatcgacttcaattccacagtttcgctttcctgaaaaatcatctcatcgcctcctgtaaatattctacccatattctaaccattctaaccattcttgtcaaccgctggttagaataatggttagaaaaacaaaaagtagaatagaatctgaaagaacaggggattgatacaatctgtgctaactgtttttcaagaggattcaaaggacttctggatataatctaaccaaattttctgttcaatggttagaaagaaataattttgtcccgaatattgtgtattattcgggacatgattgcaataggtcctattcctcttattttgagtgttcccattaaaaatctgatttatacatcagaaatcaaaaattttgcaaggcagtacagttttcatatatgtcacatattttatatattattcgtgacatcaggcagttggcaggtagatccagtcgtgcatcaggcacacgctgggttcatcctccctgggaaccagacggtaggtacattctccatagaccgtgcgtttgtcctcaatctccatgccataggctttataaaagcggtattccagattggagatgatacagcgcagggtttgcagagcctccctctgagctgatacgatcaggtcacggtcaatgctgcgcttcaaaaacagcagcgatttgtaaagctgtacctctgtgcggtaagggcggcagtctttcgtttccaaccatccgcaaaaagcgaccggtccgctctggatcacactgcggtccgggtgataatactcatagcagtccaggtttgccgtattcagaagatagagcatttcccggacttcattttccggcatgtcgtaaaaccgcaaaagcgagcggtaaagatggacatagccaggaatggaaatcatggtatttaccataaaataaaatcctccttgtaaacagcaggtgcgggaacttttgcccccgcaccgcctaaaatctatatttcgttatctactttcacgagttttcccatgacaaggaagcgtcctgtgccgcccggcgtacaggtagaaagggtcagtaccttatcgctgcaggtcacagtcacatcactttccaccgcagaacgttccttcatagctgtaagccaggtagtataagcaccgtcatccttccaggaaagctgccagggagaggtttcactgccggattctttcggctttgctgcaaacgccgcaaagatctccatgacataaccacccttcggagtaacgagatacatctgcctgtgggtatcaaagtaactttgttcatcgtaccggttcagcaaggcaaacatggaaccatcccgcatattatggccgtaaatgatcgtattgcggtctgaaaaatctgcccggttttcatagtcggcaaacaggcagccaaccttgttataggttccgtcataaagatggttcaggtaatactcgttgttgtcggtctgcgtcaccggataattgagcaccgtatcaggaagggaaagccatccgatgatgtccggtccattttcacggagcgcttcaaagtctaccgaaggcaggacaatatcggcatcgtcctgttttgtttccgttggattggttgcctgttccggggagtctgtctgctccggtacttctacatatccggcaagatcccgataggcgtctttactctcggcatactggtttaagtcacggaacaccaaaaatccgctgccgagagctaccagagcgcagagtgaaaggacagaagccccgacagccgttctttttggggaagtcctgctgtattttccctttttgaaataatacacagcaaatacgctgccgccgatcagtgcggctgccaacagtccgccatataggaaaatatacggatcatccccggtctgcggtaccggcttttgaggggtggaaggattggacggaacagaaggcttttccggcttttccggtttttcattaaaaaactggaccgtagatgtctggtcagctttgatctccaccgtagcggcatcaggaatgatataatccttgcttgcccggtttgcaacttctgttacggtataaataccgacacgaaggccctttctctacacggaatactgccattgtatcgcctcctttcttcgactattccgttacaaagcatgatccctgtggtcataatggagatgaccgccagagaccttcgcatggtttttcagtttcacttcgccccgttcctggctctctaaaaatttctgatagccggcatctgtaaggaacaagcgcatcttatcgcctttgtcgccaacaggggaatcgtaagacaatacatcaaaaacgatcatgtgccttacctccgggtcaaagcgttcaagtgccatgatgtcatgccccttcaatttttctgcacctgattgctgtctggcctcggcgatcttttctccaatcgtccgggctggatagggcagacggtaattcttctgaatatcttttaccaagtccatgcactctgcatttgacagaacacgaagttttgccataagaccttctgccgcctcccgctgttcggaattatttgaatacctcacggtcatataaagttcattcaggatctttgtctgataatcgccctcaacctgaaagagcagctttttttccatttcgtttaattccatggggatctcctttctcttgaaaataggtatgaaaaaagggcgcccaccttaaaagtgaaacgcccacggcaatcagcggtcagacataaagccggaccgctggcactattaaattttgtcgttaataaaacagcctccttttttctttatagttttcgtcaattttcaacttggaaaaggaattgaataaaagacgacaaacgctcaaaccccttgaaaataaaggctttttctgtttgtcgttattataccgtaacggcattcgcatgcttccctgcttatcagcatgggcgaaaatccactgctgattaaagagcgtcttggacatgaaaaaatacagacgacactaggaacttatggtcatctgtatccaaacaccaatattgagattgcaaagaagctgaccggggttctcagctaccagtcagcttctcaaagtattgctaattataccagtaatcagcatactgcaatgtatcacaaagaaatataaaaatgcaatgataatgcaatttcaaacacccaaagccgcaaagccccgtggttacgggctttgtagcccagcgtcaactattcaaactcgacaattactaatcaattttgtttagagattattggttgccgtgttcgcttttctttcaattatttgatttatccatattatcctgcctatatgggctaatgttatcagtttgttatcggtgttgataacactcgctccgtaactgtggataataacaatatgttccgattcagattataaacggttttgcttagaaaagcaacagtatataattaaaaacagtaaccacttcagacaaattaaatacaactactattccttatttatattcgccatcttactaacgccgatatacatttttatgaatttccaataactgctttaacacatcctctatcatctcattattttcggtataaaaaatgttctctttctcgttcaaagtattttccatgatctcgatattgctatctttatcaaagcaaccttttatacttctaaaatgattaaattcaatagcaaaatcctctccatcataaatagaaatactaatctctatatcttcaatcataaaatcggcataactgttttttacatgaaagtccttctttaagaacgggagtttttggtttggcagtcgataccgaacattgtctttttctaattcgtaaagttctccttttacgaatcctaatttctctgcattcatttcaaatgcttgattcatatttctttctgtaattttccagttaataaatacaattgcaaatataagcaaaccagccaacagacacatgcccactaatcgaattgcctttttatatttattgtaaaaatctattttctcaacaaactctttatcctcgtttaatagcttatccaaagaaacatgataggtgttacagatatcaatcaacatttgaagatctggcagacttcttcccgtttcccttaattaaagatattgttgggtaaaaaagaaaggtcagtcgattttgccgatgaagcggtagtagatttctacttcctgctcacgacttccgtcctcgcccttgacagcttcgtggacggttattttttcaattagagtgttcagaagttcggcggtcagctccacagggttgacatactgtttcattagggcaatccacttttcagcatccgctgcggtctgtacggcggcttccatcgtttcgtgaagctgtcttatttttgtttcaagttccttttgctcgttctggtacttctcggacagcatattgaagttatactcggttatgcgtccggcagaccagtcctcatacattttagcaaacagcccgtcaacctcggctttacgcttctctgcctttttcagctccgcagcctgctttttcttcgcagagtttctttccctgtcgctggcattgagtagccgtttcagcagcttgtcctcgtctttctgtaccatcatagaccagtattgcagtcttgcaagcacataggcatacagtacatcatagcggatatagtgcatggaacactggcgtaatccctgtccgtacttactgcaatggtagtgtgcatagggatttttgttctggctgtttacaccataagccaatgaccatccgcagtccgcacattttaccagcccggaaaatatctgcgttgtgccattcttctgtcgtctgcgtctgcttgcaatcagctcctgaactttttggaacacttcttcggaaatgatggcttcgtgggtattttccacacgataccattcttcctgcggcttccgcacctttttcttgttcttgaatgaaatgttgctctgcttgttgtgaacgctgtgaccgatgtaggtttcctctttcaaaatgctcttgacctgtgctatcgtccacgcataggctttttctgcgggcgcaccggcgtagatattggcgaaagtcccatatctttcatagttcagccagccgggggtaggtactttttcttccaccagaatccgtgtaatgctggcggcacccctcccgtgtacggcaaggtcaaaaatcttctctacaatccagcgtgtttccgggtcgatcagaagatgaccttttttgtccgggtcttttacatagcccagcggtgcataggctccatagtgtgcgccattggcaaatcttgtgtgcatggcagccttgacctttttgctggtctgtcgggcgtgcatttcattcaggatgtttaagaacggggcaagctcgctttctccgttgatggtgtccacattgtcattgatggcaatgtagcgtactcccttgctggggaaatagatttccgtgtactgaccggtcaggatatagtttcttcccagacgggataagtcctttgtgacaacgcagttgattttcccgtcctcgatgtcatcaatcatcctttggaaacttggacgctcgaaatttgtcccgctccatccgtcgtcaatatactcgtctacaacggtcagcccatgctctgcggcatactgcctaagcatcatgcgctgggtctggatgctgccgctttccccctgtaattcatcgtcacggctcaatctcaaataaagtgcggtgttataaatcgttgtattgtatggttgtttcacggttaaaaatcctccttctaaaagaaacaacccacgcttatacaatactcgctggtacaagtatatcataagcgtgggctgattgacagtcgttattccgtattttttcaggaagcggcggcagcgtgctggatcacatcttccagcaggctgtcaagcggcttcccatcctgtgcgaaatgctccgataccttgatacggactttccccatgacaaaatactgggtgccgtctttttcggtaagcagggtgccgctgtttttgttattgctctcgtttttgctttttgccataggcagttacctccataaatgaaatatgcccgacaagggaatgtcaggcaggtgtacagccgcagactgtctccgtgtcaaccaaaccgtgtcaaccggcagaaaagactttgaaaacaatccataggcgctctattattactttttactttttctttgatttcttggttgacatggttgacaaaggagagaaatgccccaaatatcaggcttttccccgtcaaccggctgtcaaccaaagcgtcaaccaaactgtcaaccggtggcttttcagaatggcagttccatttgccgggcttcttcttccgtgatttcctgaaaaccgtccccctccggcggagcttggttgacacgctcccagcctttttgagaaccgtatttcttataccgcttcgggcttttgtaggctgcccagccctgtatgatgccgcccgcaatgccggtattcataatctcgcagattgcccgtgtctcccagtctgccggggaatttaagttccccagtgcttcctcataaagctgcttggagcataccctgtcgccggtgtagtcctccaaataggcgtagatcatgccagcttgtgtgtcttcctgcataaagtcctgctggtgggcgttcaggtatcggttcatttccatactgaatgacagcttatacttcccactgcggtaaaccgtcatggcttccgcccacatctgttcgatatacgccctcgccgccgcttcatcatccagtatgtgaacctccgcccgttccgggtacaccgtcacggggagaaagcgccggttgccggtgcggtcacggggtaaaaagtcctgccggttggtcgtccctccgaatacacattgccgcagccggtctgccgggtgtgtctcatacggcaccttgtaggtttctttctggcggcttaagaatgacttgatttcctcaatactcttggcgttggctgtggcaatcatctccgacatctcgataatccaatgcccttgcagcttgcggtacacattttcatcgtccagcttcttcaaatcgtctgaaaaccattcgtccctgcctgccagcagccggaaaaaggtagatttcccggctccctgaccaccaaccagacagagcatgacctcaaacttgctccccggtctgaatacccgccggatggctcccatcaggaacagtttcaaggcttcataggtgtattcgtccgtatcggctcccagaaagtgatgcagggcgtaacggatgcgctctgtgccgtcccattgcaggctgttcaggtaatccctgactggatggtagcggttttcattggcaacaatcttgatggcgctctgcacctttttctcgctggtaagcccgtaattttcttccagatacaaaagcaggtagttcatgtccatgtcggtcagcgtggtactggtgcgctcccagcccagcggcttcacaatgtcaatctgctccgtcaaaaggttcaggcgcagcgccccgcgaaacagagggtcacgctggaacaccgtcaggcagtttcggatgctgttcttcacgccgcctttctgcgtcccctctaatgtttcccggatttctgccggtgtctgcgccggttccattgtgtccatcgtccttttgaccgcttcctgcgtttccggcggcaagctctgaaattcgctgttcaagccgcaacacctcctttccctgtgcggcgatcaatgccgctttttcttctatttctccgtataacaaaatatccaaaaggtattctgtgtagcttatcctctgcaacgcttccacaaaaagaggatgccagatggcatcctgcggctgtggggcgtgtgctgttttccaatgctccagcaggcgcagataatcgcatagcacccgtaaacaataccgttccgtttcctgaaatctctgctccgctgatttttgtcggggctgtgacctgttgtgacgcttcctatctggcgacgcattgccggatttctcataggatacgccgaagtcctccgcaagcctgaccgcagcttcccgtttccccaatccatacagcaaagcggcaaagtcgatcacatccccggaagccccgcaaccgaagcagtaaaagcggctgtccactttcatgctgggcgtgcggtcattgtggaatggacagcagaccatgccatttctccccacccggattccatagaatgaagcagcctgccgggtggtaacagactgtttcaccgcttcaaatacattcaaatgctccctccataaaaataccggtagcggtaaagctgccggttatatcatagctccatctcatgtttctttctctgtacttcctgtggctgctccctccggcgcagtgcggtatctacggcgttctgcacctgccgcagccgtatgacttcctcccggagtggcttgtgctgcggagacagttcggcatactctgtttttaactgtgcatattcctgtttccatgctttcagggcaatgggttttccgtccagtttttctttcagaatacggcgggcggcataaaacagccgtaactccgcatcgtgggatgtttcaaatttctccctctgtttcttaaacttgatattgttcaattccgtatggacaggttttagccgctggtaattctcgccctcccgtatcaattcctgcaattcctttatccgggcagatttctttttcatggagccgcttaatgcttcaaattcttcactgacagaggaaagacgctcctgcaaatcctctaatgtgagcagcttgttttccgtcagataattgacggcttcggcaaactgctttaagtttccggttctggctttattgctccatgcccctgcgttgcgctggttgtaataagcgatcagcaggtcggcaaggctcggtgtctgcggtttggaaagttcttcttttacctctgccatccagacaaacagggctttgatcttcttcctcacatcctgcatgagccggttggtggctttaatccagcggttcagttcccctttctcggtgcggatgccctttgcttccatctgccggacattagctccctcgtggacagtaggtatcaggtcaagcccctgccgcacataggaacggtggtcgatacgcacatccagccctttttcctcaaattttgtattaacggcagccgcccactgctcccgccagtgttccagcgtttccggctcatgccagtctgttgtatggacagcgttaaacatataatcgccgtttttatcccggattcggtttccatcttcatcaagaagatattcccgccgctgtttttgtccccatgtgccatccgggttcaaagggcgcattgttgtcatcacatggaaatgcgggtttgggataccgccgtcctctttctccgggctgtgaaaagcgaggtcagcaatcatgccttttgccacaaactgctcctgcacgaacttcctcgccagctccatgttttcttccagcgtcaattcattctgcatggcaatatcaaatgaataggcaagctgtgcttttggatgtttctcgcagctctccacagcattccagagggtcgcccggtcaagatatatttccggcgcatggggcggcagcatgatttccgaagcgatcacgccgccctttttggtgtagtcgctgacttctccatagtagctgctgtaaaggcgctccccggctcggtaggctgcgctggcaatggcgctctgaccggcgctgcgctttatctgtgcgattgaaaaatgataaagtgctatccttagtcaccgcctttctcctgcccggaaatacgggcgtggttctctgtggcagaccggatgaaatgctccgcctgcggcagattcaaaatgctttccatgagggaataaaattccgtttcggtcagctcctttgtctgtggcgcaatgctctcaatagctgccccacgggtaatcagccggtgcgtcctctgtttccgggaaccgctttccagatacgcctgccggtttttcaaacgctgcattttccgtttttcccgttccagcaggacagtggttttttcatattcctgctttaactgttccaaagatttttccatgttctcacatcctttgcttataagataaagaaagaccatccgcagacagtctgtgtgtcagtgcttctataaaacccgatgaaaagggaaaaacgcagagcggatttctcttttcggcgggtacacaggggatagccgctttagcggcgcaagggggtgtagccaccttgtcggagcgaagcgaacgcagacctcggattgctgattttatcagcggcagaggtaagctccgcaggacgcacgatacatggtctttagactatgtatagaagtgcgcccttagttcctaagggattttgccgtttccggcagtcttgtcctttttcttggaacgcttggaaagatacttcgggcagtcaaccacaaccgcccggaagctctgtttacattcgtgctggcatttccggcacagttcgttgtaagtgatacggctgcggtcatttaagaagaaagaccattccaaccgccgcttgttactcattcttgccataaccggctcctttctccgtttctatctgatgtacgcagataggctgttttgatgtagcgtctcggtatcatttttaaggttttttccctctgtatgcccctttggaaagtgcggcagtattgcagtcagggaatgatacctcacgcttatttgtcgcttctcggtacggtttcggagtcttttgccatccattcaaagaaagcaattttgctgaccttgataagcctccccctgcggaacgccggaaagccgggggtgtgtaccagctcataggcgctcgctcttgaaattcccataatccgctgaatgtccgccacatccagaaccagcggtaaatcctcgtagctgttcaatctctttttatcgttcattctgttcctcccataaatcaaataggttaaaatgcttcctgttgccgttctccccaaaagccgttttcctgccccattcctgcggtgtttccctgcattggtgcgccgaatgcgtcacttctcctgccggtcatatcccttttggacggtcattcacttgtcaaggtactgtgtggcacgaaattaccaactgcaatcatcatagcggactatccttgacaaaacaatacttctgcgataccatgagtgtaacggatataactaaattatataattaccataaacaaaggcaggggatagggatggagaatcagtttatacggcatgagccatgttttgagaggattttgtttgtcctgacgctggacaggaagaaaatgaaagagcggattttgattggggaagaacagcagatccgcttccgtctgaacgggagccaaaacgcagaggtgctttgtgatatgacacgcccactgggaacttttttgataaactttgagcgtgacacggacagagactggaacttatacgggctttctccgctgcggcaagctctccactccaaccgatggaaacagccggagctggagcaggcggcaagcgaatttctttgggagaaatatcttagcaacgaccctctgaaaatgtatgtggcgttccgtatctggaacagctatctgcttgccagagaacctcgtgaccgtaacgctgcctgtgaccgcttcatggataaaatgagcagcctgaccggggtattccataacgaaaccatgagctttgacagagaaacaggaaaaccgaaacattttcaaactggcagcctttatttcaaaggcgcaccgtcagaagatacccggcttgacctctggttcccggacaaccggcgcacagaagaatgtgtgtctgcctatgcgtccctctaccccttgattacctattatctgaacaggctgaatgactgggggctttgcttccggcagtgcaaggtctgcgggaaatattttctggcaaagagccagcggtatgagctgtgcagcgacaagtgccgaaaagtacaggcgcttcaaaacaagcgggaatttgacgagagggcaagagaaaacaactatgacctgctttataaaaatgaatgccagaactggcgcaacaaaataaaccgagtaaaaaataccgcaggctttccggctgaccgtctggaaaaaatacaggttgccttttccgactttaagaaagaagccttgcagagaaaaaaggctgtaaaaacaggaacagccagcccgaaagaatttacggactggctgtatctgcaaagtaatgtaattgtggaactgacagaatactaaatttttttctcgttgtgaggtttctgtgacattttgctgatactataaaaagaaaaaggatgtgatactatgcgaatactggttgttgaagatgaccagcttttgaataagacattaagctataatctgtcggctgtcggatattccgtggatggggctatgtcaaaggctgttgccataagatttcttgaaaaacaggattatgatttaatcgttttggatgtcaatctgccagatgggaacgggtttgatatatgccgtgaggtaaaagaacgccgtcctgataccgccgtgatttttctaaccgcaaatgatatggaaagcgatatgctgaaaggatttgaattgggcgcagatgattatgtaacaaagccctttcctatcagcgtgttccaaaagaaagtatctgctttactgaaccgcatttcagcacaatccggcggagatttctacgatgatgggaatttgtatatcaatttttccgaattatcagcgtgtcttgcaggacagccgattacccttacatcattggaatatcgtttactaaaagtgctgacaagaaattctcaaactgtcctgacccggcaggtattgcttgaaaagctgtgggatatagatgaaaattatgtggatgaacacgcacttaccacaacgatcagccgcatccgcagtaaaattgaaacgaaccagcattcctacatcaaaaccgtttacggtatgggctatatgtggattggaggagcgcaaaaatgatttcaaaaaaactctccttaaataaagtctgcataatactggcaactaccattttacttttatccgtggtcatgttttcggttctatatatcctgacaaaagaaatgtctgtggtattttgtagcatggcgttctgtctgctttttctgctttgtgttactgtttttgtgatactgatacggcgaaagctgactttgttttctgaaatactttgctgcaccttagacgaaatgatgaatggaaaaatagatatatcacaggttgccgaagaagaaaacctattttataaaatcaatcatcggctggtgcgtctttatgaggttatgcaggaaagcaaaaacagcgttgccagtgaacgagctgacttacaggaattgatttccgatatttctcatcaggtaaagacaccgatagcaaacttaaaaatggtaaatgccaccttattagaacaagaagtgccatcggataaacagcgggaatttctgcttgccagtggcacacagcttgataaactggatttcttaatgcaggctatgataaaaacatcccggcttcagcataaggcattttcccaaataacatctgaatcagagtttctgtactttctcccatctcatctgtcagatactggctgtctgttctcggataagtgacaagcttctgctcatacatctcctgcacagcatccaatgtctgctgtgcggtatagccaaacattctgttagcttccctctgcagggtggtcagatcataaagcttcggagggcggaccgttttctctttcacatcatccttctccacttcgcacatgcgctcctgacactctgcagccactttatctgcatcttcttttttctgaaaattctctgtgaccgcatccatatcgtcaaatttgatatgagccatataatatttctctttggtaaattccttgatcttctgatttcgatccacgatcatggcaagtgttggtgtctgtactcttccaactttcagattctggttatacagaacagaaaaaagacggctcgcattgattcccaccagccagtcagcctttgccctgcaaagagctgactgatagagactgtcataacacgaaccgtcttttaatgacgcaaatccatctttaattgcctgttcttccatggaagagatccagagtcgcttcatcggctttttacatcctgcctgctcatacaccagacggaagatcagctcaccttcacgtcctgcatcagtggcacagatcacttcatctactttggaatctctcataagtttctttaagattccaaactgctttttcgtaccttccaataccttatgtttccaacattctggcacaatcggcagatcatcatatctccattttttatatttttcatcgtattccgatgcatcacataatccaactagatgtcctacgcaccaggaaacgatataaccgtttccctccacgtagccatcttttcttgttctggctccaagcacggaagccagtgccatcgcaaccgatggcttttctgcaatcactaatttcatttactcctgctcctcttcttcatcttctagtacctcatcattgaaatcttcatctttcaaaacttctgtccctgcattttcctgttcttcctgctcatctgcatcgtctacttcccgtttttctgactctgaatcttcggattcattttcatcctcttccatctcatcttcatcatcatattcatgtttcggtttgtagactttcaagtaataaccacctgccgcagctccaacagcaaccaatccgatcagtagataagtccctgccaaacttttgtcttctggcatctgaatttcatcctctaccttatctttctcatctgtctctgtcgtttccggcttttcttcttcagcctgtttctctggttctgcataaacaatatctacttccggaagtgtcacagaatcagaaagtgtgaagttcatcaggtctttctcactgacttcggtaaggaaatacacattatcctgagattttgaattgtcgatgatcagataaaaaatcttaccactcttagttgaaatggtataaaactcttttgtgccttccgtagctgttttggtaacagaatctgctgtctcgccttctttattaagctgttcctcaatacctgtcactgtccgatcatccacagttccttttgcatctgttggctcagaagcctgtgcatcctgcggaagtggtgaagtcgttgttttctcagtcccagttgcatctgcactggtcgtggttgccatcgcaccattgctgtcacctgaagttttctgtttctctgcctgcttctttgcccattcataataaggattctgcaacacatacttttcagaagtatttccggcaccatcgttaccgtgatttcaatctgttttgttgtaaaatctttctgtgtcagttgcactctcagcattccatccttcagatctgtataagtggtgccattaactgtcacagaagtaatgccggaaacggtatcatttccctgaatcgtcagtacaccatctgtcagagatgcagaaagcgtaggcttttctgtgtcataacacttaatagagcgattctgctcatagaccttcccctcaccatctgtcacacgcacatagaccgtctgattaccagtaatggaatcttcttaatataatcaatcgtaccttttgtagctgttcctactgtctgttcacttcgcttcgctttggcataatcccatttgatctgttgcttctgaatctgttttttcagcttcttctgctcctgatgggatgcagcctgtgcctgtttctcttcctgtctttcaagtctgcttctttttctggatgcccactgtttcctgcgtctggcacttctctgttccagccggtaaacaccttcgccgctttcttctaacttatgggcaccttctaccgccgcattatcgtcttcatttttgctgatctcacggtgcaatgctacggaagttgcacttcctgctttcttgacaacagaagttttttctgttttcacagattccccttcaccaaacttcaaacgggattttttctttccaggagtttctccttcatttgcctgatagacctgtgctttcttggaatgctgctttgcttcctttttctttcttgcttcttcataagaaaactttttggctttttctttctgtttctgatggcggaaattgactccatccgtatccatctggttcaatttctccatatctttgtcatttttcacagaagcaccagtttcctcataagcaaacttcaaacgttgtttttgttttggctttttgctgccacctgtctgatttctccggctgtctcctctgttttctgatagatcagcacgtttttctttcagtctccctgactgtccggcttcggattcttctgcaagtctggattcttttccgacttcagcacggattctttttctattttgctgtttactactctgtccaaaatcctcactttgcttctctgtccgtatcagttccggtgcatctctggatttttgcacagagggtcgaatatttttcccactccgttcagactggcggggagacttatccacaaggttttcttctttttccccctgttttcttcccatctgcacatcaccgacacggttactgacacgaacagaagatttatctgtcaggttttcttccaccagaccatccttggtcatcttctggactttcttgtccctgactttcattctctgttctgccactgattactcctccttcttcggataccctttccctgcctgtaataaacagagaaaagcgatgccaaaaacagcaccgccactaaaagttaatacatatgaaattgctcgtaacattgttttctcctttgttttaacctgcttcagaagtctcctccaagcgggttgtcatgattttatagagggaattcttcgggaatctgtctacaaatgggataatgacatttccataaaacagaagtccttcaccctcattactgttggttacataggacagctgggttggtgagatattcagctgttttgccagaatctgcctgtctccggaagcctggttcagcatataaataaaatctgaattttcaaatatattctcgatttccctggaagacagcaaatccttaatattctgagtgatgccagttggaataccaccccatttacggaatcgcttccagatctccacactataagctgcagtctgttcctcttttaagagaagatggaactcatccacatagtatctggtggacttatgggcagaacggttcatcgttaccctgttccagacctgatcctggattacaagcatcccgatctttttcaactgcttaccaagctccttgatatcaaaacagacaatgcggttattgatatccacgtttgtctgatgattaaatacattcagagaacctgtaacatagatttccaacgaagtggccagtcgctgtgcttccggctcttcctgttttctcagaaggttatataaatcctccaggattggcatcttctccggcactggatcggcaagatattcctgatatactaaccgtacacagcggtcaatgatggtcttttctaccggctccagtccattctttcctccaacaatcagctcacacaaagacagaataaaatctgctttcagtgacagtggattatcttcctcggaatagttcaggttcagatccattggattgatatactggtcagatactggcgaaacccgaactacctgcccatgcagtgcctgcacaagtgccgaatattcggcttctggatcacagacaatgatatcgtcttccgtaatcaggaagcagtttgtaatttccctctttgctgagaaggacttaccggaaccaggtgtaccaagaatcagtccattcgggttcttcagacgtttccgatcaaccatgatcatgttgttggataatgcatttaatccataataaagagtttccccttcctgaaacagttcctgtgtcgtaaatggcacgaagatcgctgttgaagatgtggtaagccctctctgaatttcaattcgattgactcccagtggaatacaggacatgagtgctgcttcctgctgataatccagttgttttaaagaaccaagatattctgcaaggaaactactatattcctcttctgtcaacaattcctccagtgcttccaaatgagctgtcactttagaagtctgctttccgccaagcagcttgcctaatatttctgtaaattcctctgtgtcacatgactcaaacatacataagatcatctccattgttgtttccaaaaccaaacgatccattttcatttgcgtcagctcttccattgttttcatggcagtcataagcgcatcacttgtcatatgttctgtattgattcttccttctgaatcaaccaatcctattgcaaataattctaaaaagtattttctcataaatcttgtcctcctatcgaaatggcatttcttgttcaagttcttctggtatatcgaatggaatcttcctcttctctgctggttgaaatccgtcagattcttctttttttgttttggcttctgcaaactctacattatccataatgacttcggtataataggatgcagttccagtctgttcatctttgatctgagagattaccaactctccggaaagagcaatcttaattcctttttcaagatatttctccacaaattctgcattatttccataagctgtgatcatcactacaaatgctttgcttgtgcgatttctttttactaccagtggaaacctagatactttggtttgtcccttttgcgtagatgtcagcttagtttctggatctctggcaagtctacccattaaaacaatcgtattcattctttttgtcctccctttcttcctgcaacacccttccctggtatttcaaacaggataataatctgtgcattttctgcacgaaaaaatgaggaatggattcgaaccattccccacttgctacaggatttctcctgtaatataaataagaaaatctaagtattcacatttgggctttgtctgtacatatacatctgatcgttatcattccagataacccggctgtaaaaatacagtcacagtctctgtttcagcagaggtcctgtacccttcggtggtatcattattgcttcgctcttcccgtaggagtcttcgcctgcacgagccggattatctccggtaagcatgttcctcaagatgtatcagctccttcaattgtcaaggtgcaatcggaagaactgtctgaacctcttttacgtttgtgatttttggaaatcagaggattttcaatttgccttccatatactctgtattgggagcgacaaaatcggacatgattttagaaattttttgaaattattttttgaagtgtaaaaagatataaaaaaaagatgccaggatttctcctgacaccatagtgactatgccaacttcgtgcccactgggcacaaggttgattgtattattcttcatttcctaatgatattggttctttctttgttttcttgtttttagatatcatcttatgacctgtgtaaatagccataatcatacaaagcaaagaacttgccgcaaaatatttatggcttgattttgaacctttatatccgctataaaaagttcctagcatcgttatcaatgctccgacagaccaatattcatgagctttcattctaacatctccctttgtgttaattttaatatgtaccgtttgatgaaatatgcaaacaggaatttggaacgtgctttataaattttttccgatcccctcaagttcgttcatggaatccttgtttttttcaagttcatctctggctgttgcataatatgattttttgaaaagcatatcccatgaaagatattttgccatacagtcaaactgcttatcaatcagctcatactggatactgtctacgggagaaccgcctacaacaatcgtgccaacttttttattttttaactgcaatccacggcagtagcacttatcaatgataagtttcaattgtgctgacattccccaccaataaactggtgtagcaaaaagaatcatatctgcggcagcaattttatcaattgtaggatttgtatcatccttatcgacgcatcccttagagcattgacagacaccacatcccttgcatggtgcaatgttgagtttgtcaggttcaatgatttcaatttcattcttttctgatgctccttttataaatgcattgattgctgtcagcgtgtttccttttctggcacttccattaatgattacaattttcatgcgtgtatcctccaacttccgatttcatgatatcatttctaatacagattttaccgtatttttcagattcagtccatcttttaatcccagtcgatagaaaaattcttctgtttctgctccactgctaaaaattgcattacagtattccgtaatcacttcttcctgttcttgggataacgtttccagtaatttctggtatttcttatcaatctcacttactggctctttatcctgctttaacttccattctgaatatgctttccccatatgctctgtaattgtcagattcacaaattcctgcacttcctcggatatggtgctcgcagattcctgtttatctttctttttatcatttgatttttcaagtgtcgtgtcatcaatataacgaatgatttctcgaatatttgacttcatcgactgcagatatcctttcatcagcacagctacttttctagcatccgatttttcggtttctttttccagcatataaaactcttccagttctttcagaatatccatccctgctttcatctgaaattccacctcaagcaaatcatccatcactttatataattcttccattgtttatttctgcctttccatatagcgccactatattttccacaatcatccaaaaataaattcctgtaatccacatttcacaacttcaattactgcaactatccccataccgatatgtgggagtagaacaaacactactgtcgtaataatcgctgatttcattgtccagtccgtactgattccaaacccaatactcaaaacttctgtcacaacagagattccggctatcagatagcagaatccagcagataacccaaccaggaacaccagcacaatattcaccgctgcaagtaccagccaaacaggagctgcaataattcgaaatggcagttttatcataaatctcaacataattcttcctcctactttgtgcccagtggacacaaggttattttagcatatctgccagatatgactatctctttttaaacttcgtgcccagtgggcacaaagttcttacctgtctggaatatccttcccccagtacatgtcatgtcgaacttcagcatcataaaactgattgattgttgcaggagcgttatacaataccgtcagcatatactgccggatattcttcactttgcttgtactcctgtcaagactgaaaaacacatactggatgtgttcatacccgactttgagcaaacggctcttgaccacttgtgtaggcacagcttccccattgatctgttgatatgtctttgtcgaacatattgcatccagcatcagctctaccagctcttctactcgtccagttccatagctctgacaaaggatctcatattcgatattatcatgaattaactgtcgatactcatttctctcctgtatcctatctctccctttctcttgttcagatagatattgataagattcattctcactaaattcagtataattatattcagtattattacagtttgtttttgaaacttcttgaagtttgttttctaaacttcttgaagtttgtttttcaaactccttgaagtttgtttttgaaacttcttgaagtttatttttcaaacttcctgaagtttgtttttcaaacttctgtgtatttacgggcttttccggctcttttttcgcatattcttctatttctgtctctgtattttcttttctctctgctacattttccggtgtttcttccgaatcaaagattgctggctcatctggatattctgtcaggctgaaatttttcacgtaaataacatttgtttttccaagtccgattcgcctcttctcaatcaatccaatccctttttcctgatccagctcttttagacaattcacagccttattcctgccacagttaagcatttccataatctcttccaccgaaaagaaaatatatgccctgtcctcttcatcaaaccaccggttcttgatggacagtgacatccggtctaacatcagtccgtacagcacctttgcttcgcaggagagatttttaaaatattcacttgtaaacagcagtttgggaatacgataaaaactgtacatatcgcattccattccttgaaaataatggaatgttgctcttatactcatgacacatccctcccttcgtacttatcaatgattctgattgctccataataactgcatcgacactggcaagtgcattgatcgtcagcattccaagtgatggcatacagtcaatcaatatatagtcgtattcttctctcattctttctatatattgttttaagacaagttccctgctcataatatttacaagtgaaacttccattccagagagttcgatgtttgccggaatcaaatcaatttcttcctggtgatgtaaaattcccagtgtattttcaaatagttcatcttctacaatctttgtcagaatagtagccagtgtgattggtaattcatctgggttatgatacccaagacttgctgtcatacttccctgcggatcattgtcaatcacaagcactttcttccctgcttttgcaagtccgactgccagattcacgcaacttgttgtcttgccaaccccgcctttttgtgaacacaatgccagcactttacaatccttcattactttctcttccatcctttttatcctcccataaataacttgaacctttcagcatccataatgctgcttccaaaaatgcaagataccgttctgtcatactatcaagaaccggttctgaaataactggtttttcagacttcaaatcttttgccacatcctccaaaaccaaactcatttccttcatttctgaccggataatctcaattgtttctttctttccaacaacacatacatgattgtaaatgcatgatcggacgatataatcctgttttttcattccgctcactttcactcgttcttcaattgttgctttttcataagaattcacccgaaaagaaatggtcgttgtgttgtgttttccatgtctgtcaccagccatcgcttattcctcctcttcctcatgtttcttatctagcaaacctgctaatttactctgtgtagacggatacagatgtgaataagtgttcaacgtggtttccaccttttcatgtccaaggcgttctgcaatctccaatggagccacccccatatcaaccagcatactggcatgggaatggcggagatcatgaagtcgtatccgctttacaccagaccgctcgattccggtagccatacaatgttccatatgcgatttggtaaaccgaaaaagtctttcctttttcataattccatacaaatgactgcaatactccctaaattcctctgcaagaaaatccggcatcgtaatcacacggatactctttggagttttcggctgcgtgatcatatcctttcctttcagtctctgataagatttattgattgatatggttttctcttcaagattgatgtcattataagtaagtgcaagcaattcaccgatacgcattccggtccagtacaacaaaagaaacgccattcttgtctccggcttatcacttactgtttccagaaaagcattgaactcttcctgcatccagaagtccttcggttctcctttactcttgccaatcgctcctgccttcctgcagggattatcctgcaggttataataccgcattgcataattgaagattgcagtcagctggcagttcactgttttcagataagtaggagaatatccttttccattcttatccttatacgtcagcaactcattctgccatgcacggacgtctgccaccgtaatttcactgagaatcttcttttcaaaataaggcttgattttcaggtcaataatatatcgcttcgtgtacatagtgttttctctgagacggacatccatatctttgtaataaatctccagaaaatttccaaattcaatatccacaccctggctctgctgttgcaggaaatctctttcccattccttagcttcacccttggtcctgaatcctcttttctgttttcttttccgatttccctgccagtctttgtaatagacctgtactttccagttttttccttctttgtaaacccccattgctaatcctcgactttcatgccataaatcttttctgccaggaatttcgtagagatttttccagctactacaatatagccttttgccttcaattctttgttgtattctcgcatcagactatatgcataagtttttgaaactccaagaattgcacacacatcatccacatccatatacattttttcctgcatcatactcataccgctttatcctccttcaaatactgctcaacatgttccagaccatagatcttgtcctctacatagcgggttggcacccgaccgagaatcacataatagttcttgcttgccagatcggcattcattctttccactacccggtaagcaaacgaaactgataatccaaagagttctgcaatgtcttccactgataaatacatttttctcttacgcatgaaaccattcctttccctcttcctgtggaatctcacaagtatcttctactccgtagaaacgcttcacaaaatactttgtcggaacttttcctctaagcgtcaggtagccctgttcttccagttccttgttcagatttccgatgatttcataagccgatgtctgttttacttccagaagttcacatatatcggctgcctttaaaaataatttattctgcataatcagtacctcctgtgttttgaatatttatctcttcatatactctgtactggcagatgcaaaatcggacatcattttccgaaatttatcaaattttcttgttttttaattctccatcagtgtgattactgtgtcatggagtttaagctcatcgaaagtaaagaacctttctgtggtatctgttttctaaatgcaggcaacaaaaaaacagtctgccttgacgaaaatcacttcaatcaaaacaaactgttcttcatatttactctaattttattttatgagaataaccgatttcacgaaatttgcaggtgaatctggaatataaacaagagaaaaaaataatttttaaactccatttgcactccatttggtcttttcgacaccccgcaaagccttggcttaacagtgataaggaactaatttacttatcaactgttagctgacggtttccggggtgcatacggacaaatcccgtctgatttctaacagaaagtcagacgggattttcgctttatattacgaattatggaggacataccatgaaaaccttaatatcttgtgcctacaatatggataattgctgtgtggaagtgaaattcagcgacggcagtatgattgcgattgacactatcgtcgttgagaacgagattgctgacaatatgtatcagcggtcagagctggattatttgatctacaacgctcctttggagtatgcagaccttatcttgaacggcgatcccgaaacctatttgaaaactgtaacagaatacaagccttgggatagctgacaacacgctgcccgcaggagaaaatcctgcgggcgtttttctgtttatattatttccctccgttggatctcaatttaggaaagaagatgacaatcttgaagctctttccccactgggaagctgcttccagatgaagatttagatcgtcggccatcttcttaaccaggtaaagtcccataccggtagccttctttctgctgtcagtagaatccccggtaaagcccttttgaaaaatgtacggcagattatatttttttacgccaatgccgttatcttcaacagaaaggatatctgcagtctccgaatgtatcacggaaattgtaagcatgggactatcgctgctatatttgatggcattgctaacgatttgtcccaacataaactgaagtcctctacggtctgtatagactgtttcagattgcagtttgttgagaatgacaaaatgcttctcttcaagaagtggggcatagtcctccagaacttcacccaagcagtcattcaaattgacatcctcaaatcggtaatcctttgtactgctcttcaaccgggcatagtacagcatctgcgtgacatcctcctgaagctgactgcggacataatccagctttgcttgcagggaaggagagatttcatcgttccggttatccaagagcatggtcagcaacgataggggcgttttcgcttcatgtgcccagccctccacgtattcttcatagtcccgtagggcatccgccatattgttactctcgtttttgtattcccgtaaaaccgaagccaaaaatcggacagattctccttctttctgactaatggcactgagcagccgttcttcattgcagatggtaggatcactgaggaaatctcggaacagttccatgtgggtgttctccctcttgtttagtacaaacagaatcgctgaaaacaaaaggatgctcgtcagaactactaacccgatcaaggtttgaaatacctgaatgtcagaaatccaaagaatgacagcgcaaaagcaatccacgcccagcagcaacagaagccaggggtagtaccgttctatcatgtgccaaagctgcttcatagagacacctccgcttccaaacggtagcccattcctcgaactgcaacgattcgctgcttcatttcaagggcggacatcgtttttttcagccgggttaggttaacctgcaaggcattttcatctatgtattccgtggttccccatagtgccatgcaaagctgctccgtcgtgaccagagcatcgccgccggacaaaagagcgaccaacagttttccctgattttttggaagcaccacagaggtattatgaatataaagcgtgtaggtctgctggtctaacaggaaatctggtccctctatgagattggtacggccttcataccttttgagaatattggataccctggcaagaagtcgatcttttctgcacggcttcgtcaaatattcatcggcacccaactggaacgcttgcagttcatcctttacctgatctctggaagtcagcaccaggacggggatagcagttttattctttagctcctggcagatttgaaagccactgatctccggcaagttcaggtctaagatcacaaggtcagggcggagggctgccaagagccgagcggcatcttcaaactcggtaattgcctccacaagatagccgtccttttggagcatatcgcagagttcttcccgcatatagacttcatcttccacaacagcaattcttttcatgacagcacctccttccaaattattcttctctctgcggctgcatcagtgtcagcaaataccgatcactggagcgcttgaccactctcatataaatatattctatcacgcaaagtagtaaaatcatagcagcagatacaagcagcatttcagacactgtcccacgggttcgggacgagagtatccctgtaaataacgccctgactccaaacagactgctgacagccgcaaccaatacaggaagtcccataaaccaggtaatttgctttccagcagactggcaaagggtttcgtaagtagctcccaggcggatcagggtctggtatctgcgcccggttttctgctgactcatcaggaactgaacacccacgatggtgttggcaactaccaggaaaacaatcgcaagatagagggtaatataactggatgctatggtgtagaaaagctgacgacctatattctgaagatagctttcatattcaatgccagtttcgtccagcttctcgttcaaatccaaatatgcagtcataaggctatttccatccagagcctgctcactgagcaccgcattgacataggtatcatacattccctggctataatataggaatgcttcatccggaagaatcaatgcaaaggacaaggttatagaacggtccgtgaccaaattcacagactgaacctctcctgtaagatgaatcggactaccatccagttccaccttgggctgtccggccaatacttggttcagcattgcggtacgacttaccgtagtaaactctgtatcaatatagacagcggcctccttttcgcctaattggagagccggtttgccggacaattccaacaaacgattatagtccgataaacaaatcaaatatgggtatgtggcataaccaagattgttcagaaggacatcccggtcttccgactggggcaggctccgaagagagtccataacagcgtccatgctgtaggcattatcataatcttctgtggtgcgaatacgcccaaccctcatttcaaaaagctctgaaaattgattttccaaaccgttttctttcagggctgcctttatattcggaagaacctgcgatgaatcttctgcagtatgatcttcaaaagtatagtcgattacatggccagaagacaggctattcgttcctgcaattcctacgcccgcaccaaaacaacacagcgccgccagaatcagcagggagctgatggccatggaggttgactgatgaataacattctcctgaatctgccggaaggtaaatacatgaagctgcttatttccttttcctttcttaacaatcaaagcaatcagcgcacgcatcccatagaaaagcagcatcgtaccaactatgcccaacagcaaagtcagtcccatcatacttacctttgtccatgcaattccctgaatcgccatgtagtaagccactgccaacatcacacttccgcatatagcagccagtccatagataacagatggcatttgctttttggggcggttcgttggctgggatagcaaagtaccgatctcctggcggctgattcgtccactcaaaatcagaagtgccgtcagcttaattgccagaaatcctgccagcgtccattcaattgcagaccaggataaagaaaactgatgaccgatgatccccatgcctaccagcttggcggtgacaagactgacaatttctgaaagcaccacagccacaggtaagcctatgagcatggcaagaatactggtcaggaaatcttccgccagaagcataccaaacagtttacttctacgcatccccaacattagataaacaccaaactcatgccgtctgcgctcgaactgatacttgcaggcaaaatagatcaaaaagaacagaataccgagggtcatcccataaaacgcaggaatcagaagcaggagtttgtcaactgcgtcactctccattttctgcaaaaagagcatcacatcttgagtggagatggaaagaatcatgtaaaaggcaacaatagaaatcaccagggagctgaaaaacagaccgttttcctttcggctgcggtggctgttccgaagaatgagattagagaacatttgcgctgccccctcccagttgcgccatcaccttcaggatgcgcccgtagaactcctgctggctttcgtctccacgccgaagctcatgaaagatcacgccgtcctggatgaacagaatgcgcttgcaaaagctggcggcattggaatcatgggttaccatcaggatcgtagcttgttcgtcacgattcaggccggacagcttctccataagacttcttgcgttcttagaatccagcgcacccgtcggttcatcggcaaggatcatttggggatgtaagatcagagcccttgctgccgcaacacgctgacgctggccgccggacatcttggacggaaacttatccagaacatcagtgatttccagatagtcagccaactgcttcagccgctggctgctttctgcttcggataccccatgcaaggaagtcgggagcaggatgttttccctgccagtcaggttgtccagcaattcaaagttctggaatagataaccaacttttttgccacggtactctgcaagagcctttcccttgagggattgcagagtatcgccttccacctgaatgcttccacctgtgggttgaatcacagtcgcaatacaattgagcagtgtggatttaccggaaccgctgcttcccataatgccgagaaactctcccggcatcacctggaaggtgatcccattcagtgcctttgtttgacttggcacattgccatagatttttgttaaattttcaatattcaaaatgggtttcatgtgaatacctcctatcatttgtaataaaatgatagcatgggaacacagcaaataccacttacagtggttgtaaggattcaagatataagtggcggctcaagggggacgagcatatattttgtaagagcatcaggcgacaatgataaaatataccggatcgcctccttggcaaaccagttcgttttaattgtatcccaatcagcaagtcggataatctctgctgtgccgttctcaaaatcaactgaaatttcgccccattcgccgtcgcagtctgcttgatattcgtagattgcggcggcgattttctttttgcgtttggttttggttttctgtttcagccggacagcatggagcgcaccttcggcaaccagcagttctgtcagtttgtccaccgctttccggtaggctcgctctgcaccgctggctgtgctgccctcaaacataatcgccaattcttcaaaagtggggcggttcttccatgagccaactcgcccgcaggtcatacagattgctaaccgtttttcgagcaaggtctgttcccggtaattcagcttctcaaatgcccgctgtaccttttctgcttgtatgccgttccagaggatgtcggtatagttccagctatcgtcaagggctatatcctcgcctgtttcctcgccgtcctcgtccgttatatagaacggctgctggttgcggattccacggacaactttcagatattcttccgcaagagcaaggtcgcagttatacttcttggaaaactggttgaccgcatctttggtgttatggtacagccacgccattgatcgcaccattttgtaattggtcagagaggataccgaccatttttcttcgcccatgcggaaacggagcatagaatcccagatgaacggatagatgtatgtagcatactccgcacccttggcaggatcatagtccatcagcttttggagcatttgctcccggcaggagatctttatatcgataaatcggtctgtgtcgtacagattgccgccgtccacactgagaaagcctttgatgcgcttgttgagctgcgtttcgtagtggtgcagaaagaacgaaaaatatagcaaattcttttcccgcaaagcagacaggatatattcattcagactgtccaccgctggcggttccggttccagttggaagatgcgctctgccacataggggatgatgccgtcaccgtgtggattaacttggtgcttcggtatgtatccggtcatgttccacgaaaaatcatttagcatagcgcacctcccttctaagtaatcagcgggaataattaaccataattccaagtttgtcttgcagcatttatattatccagaagaacagatgcaggatttgcctcgtaatagtacgtgctcatatccaaaatgccttcttccatttcaccccactctgctgtgcgagaaacaaagattctattatatacacaccaatcgcatgtggtggtgaaagcagcaatatctgcaaagtcttttggaaatacaattcttcttccatttgatgttggcttaagatagttctccattatttctttgaaattcttcagatcataatccgtagcgttttccaaagctttacagacaatcaattcttcgtgcgtgaattctgtaagtgtttctaaatggtttgcaagaattagaccataaataacgcaaaccttcgggcattctgcatttacggtttgtttgaacagattggctacgataatagccttttccgggctggagtttacatagttgtaaagctcgttcaatcttctttcgagattaaagccagatgcaagaccgttcagtagatggccgagtttgaaggtattgtattcagatagaagatcatttcctattccgcctacaattcccgcaactgggtttactacgcccaacacaccaatagagccagaacggattattttggtcataggattgtccataacccggctaagcgcattcccaatatcagttaaatcatatttctgtgccattacatattcctcatttcgtccgtaattttgcttctttcttcaaagcagcctgtcccatctctttttcgtaatcacctttggcataggcgacattgctcagcgctcgaagcattttatcctttgccagctttttcataacctctgcaagatcagcgtccagagtaccacgcttcacatagcggtttatggtgttcagccgtttctcataaatctgtttcaccggatgatcgtccgcaagctcccgttgttctctgcctttcaggttgccgatctgtcggcaagtgcggtgcagcttgtcccccggtgcatagccgccgcagtatttggtgtgccttgcgttggtggtgaggaaccacttgccgcagattttgcattttttcggggcatgaccaacacataagccctcaaaaagatcagaccggaacatccctacaaaggatacatagtgcatccgcttgaccagcttcgcaactttttcgccgggacggatgaccgatatatactgaacggaattattcaaagtagacatccaggcattgccctccgtgatagagaactccggcggaaaatagtcgccgaacatttttgcaaaaccctctgcggtgcgttctgcttcattgccgtctgatttttctgcaaaatcaagcatggccgtttggtattccccaagggagtatgccagatgcccgaaaactgcggtatagcgttggagcatcatcgcatcggcaaagttctggatttcttcaaattgcaaagaattggttgcggcttttatggcaaactccacatatttcagcgcattgtccacagtaaagactttttcaatccgttctctgtgctttgagatattcatataggagaacggcggtgtttgactgagaatatcaagcatcgtcagagcagcttccgttgcaataggacagagtgcagaagcatcctgtccggcgtttaatattccaagcagcagattgattttctcgcattgctcgttcatctttgcgatggtatccgcagggacattcagcgcatcacaggcaagagcgccgacaggaagtgtttttccctcatatatgaccgtatcctgccaaaaatccaatgtcatcagttcttggttcatgcttgcccctcctgtcctgttttttcattttcttaattctatcatgctaatgtaaagaaatctacatctatccataagttgtcctgttttttgaaacggggttgtcctccgattagcctgttttttgaaaaatccggcataaccatagtagaaagagccaaacacctgccaatcatggcgggtgtttcgtgctttctaatactatgaacggaggttttttatgacgatttatgaaaccatcaaggcggcaatcagcgtaaagcaagccgccgaacactatgggctgaaagtgagccacaacggaatggcttgctgcccgttccacaacgacaggcatccgagcttgaagctgaatgaggactatttcttctgcttcggctgtggagcaaagggagatgtgatcgacttcgtggcaaggttgttcgatctgagcagctatgaagcagcgcaaaagctggctgcggactttgggcttgacccgaaaccgcccattgccgcagctatggtcaagccaaagcgtccttatatccgccagttccgggaggatgaaatgctgtgtttccgggtgctgacggattatctgcatctgctggaagattggaaagtacgatacgcacccaagacaccggaagatgctctggatgatcgttttgtggaagcctgccagatgcactgtcatatcgaatatatggcagatgtgctgaccgtgggtgatctggaagagcgggtggcattggtggacgagctgatgaaggagggcaaaattacttttctgcaagagtacatcacacgaaagaaaaaggaggtggcgcaccatggcgaagaaccggaaaacgcctgatatgaatttgcctgtctggtttgatgggcagaacatcaacgaagctctgttttgtgaagaatttctgcatgagcgcagaattatcttcgcaaacggagcttttttcacgcccgatggtcgagtgacagatgaccttcctctgcgtggggagatttacgaaaagctgaaattctgtgccgtgaacaatatcccccggaaaatcaccaacattctggaagtgctgaaactggaagcacaagtgcctgactttccgccggaacaggatcggattcatgtgtccaacggtacgctgctattgaacggcacatttaccgagggcagaccggctatcgtgcgaaaccgtctgcctattgtttacaatcctcatgcacctacacctgtgatctggctgaactttctggatgggctgctccatgcggaagacatccccactttgcaggagtttatcggctactgcctgattccctccaacaagggacagcgcatgatggtgattaagggcaacggtggcgagggtaaatcccaaatcggtgcggtgctttcggctatctttggcacgaatatgaaagacggcagcatcggcaagatttctgaaaaccgcttcgcccgtgctgatctggaacacatcctgctgtgcgtggatgatgatatgcggatggaagctctgcgtcagaccaactatgtaaaatccattgtgactgcacagggcaagatggatctggaacgcaagggaaagcagagttatcagggctggatgtttgcccggttgctggcattcagcaacggcgatctgcaagctctgtatgaccgcagcgacggtttttaccgcagacaacttgtgctgaccaccaaagaaaagcccatggacagagccgatgatcctgaccttgcagagaagatgaaagctgaagccgagggtatcttcctgtgggcatttgaaggcttacagcggcttgttgccaacaactttaagtttacggagagtgaccgtatccgggaaaaccgggaagcggtcaagcgtgacaacaacaatatctttgatttcatggagtcggagggatacatccgattgaaagcggatgcttccatcagctctaaggatttctatgaaatctaccggatgtggtgtgaggaaaactcccttgcaccgctgaaagcccgtagcttcagcgatgccatgattgccaatgccgggagattcaatctggagcattgcaacaacatcaccaactctgccggacggcgggtgtggggctttatgggcgtggaagctgtggcaagacctcatataaatggattttacgatgtttcgccgtgtacgtacgtaccggaggactggcgggattgattttgccagtcatgctctgtacgtatgtacgcagcatttacccctgttttcttccgttataggaaacagcagctttcaaagctgacctgttttcgggcattaaaaatcaatggtaatggaaacagcaaagtttttgaccgcaggacgaaactatttcacgaaatcgtgcttctctgaaccgtgtaccctgttcacggaacaatgggtgttttcactgttccagaccaaaccacacaaaacggcaaagtgggatatggtcatatatggacaggacatcacaagcgaaattctgaacggatttcggagattgcagatttttcactgttcggtgcatccactccaccttggagcgcagaggttgcaccgacacatgaactgaattatggaggattttatcaatatgaatatacgcaacgaaataaaggcacagatcatccgtgccgggatgaccatgcaggaagttgttgacctgctctcggacgagtacggatggagcgacagcgtttccaacctgtccgcaaaattacagcgggaaagtatacgatacaaggaagtattggagcttgccactgtgcttggttacgacatcgtatggcagaaaagacgggagaagtgataccccggcaacagccctccgcatctcccgtccccataggcgcaccgcagtgctgcccatggacaggcagtgaaagatacggttttcgctgccatcgtctgcaagaaatgttccgcagaacagcttcatgcagacgggctgaccaaggtaaaaggcgcagacattttgccttggtcagcagaggtcaccgcagtgaccgcattccccctcgggagagccctcggagagcccacggcactttgtagccagcatggatgaaagtgtaatagtgggttattacactttgaaaaagtgccgttcctcagccctccgctgtctgcaaatcttaaagaaaggacaaaaatctatggcaagaaatgatggaattgatcgtaccttagccagaaatcaggacttggaaactccggatgatgtgacaaaagtacaggaacacaatgagcgtgaaaaagaccgttattccaatgtggacatcgtgccggaacgtactgcgctgaatgttcacttcaagtctcccactgacgattatgtaaaaatgtttgagcagatggagcaggacaagatcatctccaccagagggctgaaaccggatgccgtcaaatatggcgagttggttttcgatgtgaactccgcttatttctacaaccacggcggctatgagtttgcaaaacagttttatgccgatgcctataaagccgccgtggagatcgtgggcggtgagcagtatatcctctccgctgtaatgcatgccgacgagcgcaaccgggcaatgtcggaagctctgggtgaggatgtgtaccactatcaccttcatgtggtttatatcccggtggtggagaaacaaatcctgtggtcgaagcgatgcaaggatgaatccctccggggaacggtaaaggaaacgatcacacaggtcagccgcagtaagaagtgggaatccaaacccgttcttgatgaaaacggaaatcctatgttgaacgcaaaagggaaaaagattttgaagtcgtcctacagtgtgctgcaggatgactttttcaatttcatgcgaaacgctggttataccgatgtagagcgtggagaatgtggcagcaccgaagaacatctgacggtgacacagttcaaggtacaggccgaacagcagcgtttggaagctgtgaccggacaggtggcacaggccgagcagagcttagcggatgccaaagctgccacggagaagcagaaaaagaaactggaagctctgaaaaaggaaactcaggctgctaagtctgttgctatgactgcacatgagattgagtcgatgggcaagaaaaatcccattacgggaaatgttaccatgacggcggatgagtgccgcacgctaaaggattatgcggtcagcagctttgcggaaaagtctgagaagctgaaatacaagcagaaattcgagcaggcagataaaaacgcaaagatatggaaagaccgttttgaaaaactgaacaaagactatgaggagctgaaacaaaaagcccagcctttcctggatgcgattgagattgcatctgaaaaggtctgggcttttatcaatgccatcctcgccaggggaaaggaactgtatgaacacaaacaccctgcccgcaatcgtggacaggacatggaaatttaagaaaggaactatttgcctatgaagaaaaccgtagatgaaattaacaagatgattatggaagatgccccgatggaagaaatcaacgatgccatcggctatattgatatttgctcctgcttcgatccgatttttgagccgcctattgattttctggaagaatgccgcaagcgttgggaagcggcacagtcctctttctgcaaaaccattgagtgcaagatcggaaacacatggtatgtgattgaaacggagtgtgatggaaatgagccacttaccgacaaggtaaaacggctcattttttctgacaagggggtgatttgttaatgactgcgacacaaaagcatgatataattccaatatgcacaacggtactgtcggctgaccaaccaccgaaggaggatattatgttggatcagcagaaaattaccattctctattgccgtctgagcaacgaggatgcccaggaaggcgagagtaacagtatcgcaaatcagagagagtatttaacccgatatgcccgtgaccacgggtatacaaacctgaaaattctggtggatgacggttatacggggacgaacttcaatcgtcccggtgtgcaggaaggctttgagcttgtcaagcaggggcttgtgggctgctggctggtcaaagacctcagccgctttggtcgtgactatctgactgttggacaatatacggatattatctttccgagttatgatgtccgctttatcgctataaatgatggcgtagacagcaaccggggagacagcgagggcttcgccgcaatccgtaatctgttcaacgagtggtatccccgtgataccagcaagaaagtccgtgtcagtttgcggcagagaggaaccagtgggaagcacatgggcaaaccgccctacggataccgctgtgacccggaggacaaggatcactggattctggatgaagaagcggctccggtagtcaagctcatcttcgacctttgcattgacggcaaaggcccggagcagattgcaaggattctggaagaaaagcagattatgaccgcaaaggcactctatgccaagcgaaagaaaaagccgatgccggaaagaccgtaccactggggcaaccagtccattgcagggattttggaacggcaggagtacacaggctgtacctgcaacttcaagacttattccaagtcctacaagctgaaaaagcggattcccaatgagccggagaatatgttttatctgccggacacacaggaagcgattgtatctcaggcacagtttgacagggtgcaggaactgaggaaaaacaaacgccgccccgcaaaagcggaacggcagggattgttctccgggcttctgttttgtgccgattgcggcggcaagctccactttgccacaagcaaaagctttgagggcaagcaggatcactacgtctgcaacaactacaagagcaaccgtggtacttgtactgcccactatacccgggaagatgtgcttcgtgaaatcgttctggaacgcatccgggcagtcaatgagtatatccgaagcgatgtggacggttttcaggaggaatggctgcaatgccgcaggactgaccaggagcgcagcatccgggatgacaaaaagaagctggaacaggcaaagaaacgccttgccgatctggatgtcatcatcgcccggctgtacgaggactatgttcttggaaatctcaatcaggacagatacagaaagatgtctgcggactatgaagcggagcaggaacggttaaagctcgaaattgaagttatcgaagaatgggtggaacagcgggaagaaatgaacgacggtctggatgcctttatcgccctgacacagaaatatgtggatgtggaggagctgacacagaccatcgtgaacgagtatatcaagaaaatcatcgtctatgccccggacaaatccagcggcaagcgcaagcagaaagtgaagattttcttcaacttcatggacgatgtagatattcccgttatttccgagcctatcatcacgcaaacaacctatgaacacagaaaaacggcgtgaccttcgggtcacaccgttctctgcgacaaaatagttacttgtcactattaagcctttatttatgggcttttccgcgatttttcaagctactcaaactcctttgcggactgcatttcatgacacgcaaaggctgttattagaggcttatagttcgaacatatgttctgattctgtgcttttcgcaccgcttatgaagaaataaactccaaaataactccattttactctttattattttgttgttcttctcttgcgtacaggagatccaatgcctgacatacaacaccactcatgctctgatagtgtctttctgcatactcaacaagtctctgtttttgctctggagtcacccgtactcgtatgttttcttctttgccatcttttggtgtttttctagccaaacatatcacttcccttccacaagtacagtttactactaattactacaaaatgtcaatctatttttgttatttatctatatattctcttggactaatcttagactaatttacttctcactcctgtagatctttatcaacaatctcccagtaaccattctttggagatccatgtcttataagaataccatactcttttaacttcttaatattgttctcaatatttcgactggcaaccccgattttttcagctaacttaaccgctgataattgatgatcttctgaaagcaactttataatcttttgctgtgtatcgttgagatctgttctccactctgcctccgatgcttctccgatgcttctccgatgcttctccgatgcttctccgatgctttctttttcatttgtcatcggaaatgaattacggaacacctctacccgaaacatattatcaaattcctgaaatctcggtctcggaagtccatactcttctgcagcattcaggattctttttattccgcttccccatgcttctacgagtcccatctgactgaatatattggcaatacctttattccggatcttagaatgaccattcatgacttcctcataagtcaatccgttatataatccgcctggagaagtcacctccaacctgtcatcataaactgcgacctgaatacaggattcatccaataggttacggtgacaatgggcgttaatgatcatttccctgattgcttccggtggtagctcatacttctcttttcgcaccaatccatcaatcgttgctccgagtcgaatatttctcaatacaaagtctacagcttcttcgatttgtgtatagattggtcctgtaaattctctcttatccagaaacactgcacgatctgttcccttgaataccgcacattgtgttttggcgaatgaaaaataatctgatgtcagcaatgcataggcattcgttgccagaagctgtccctcgctctgcttcaagattttccagtttatcagctgctctttctttacagaatgctctgccattcctgccttcttccggaacttttcgatatcctgacaaagtttctctgttgcttcctctgaaacaggataacccacacaagtaagctcatcccatgagattctggctccttccatttccagctcttttatcttctccggaaatgcctgccttgatgtacctgcaacacggatataagtaccattatcttttccctttgatttcagataatacggtctgttctttccagcttctactgatacaacaatgaccgttttcccgtctactgtctgcggctcaatatcaggaataatctgtggcacacaggaatcagaaactgcattggcaattccgtccatcagctgaaacaacacatcattttccacaccaacaatctggtgtgttttatcatctactccaacaatcagcttgccgccttgtgtattggcaaaagctacaatcgtcttcatgtatttttcacttttatcgggtaaggataccttgtactcaatatttttcgactccccggaaaacatagtttcttctaccattctttcactcctaatctatactcgcaccaccggtacaagtaattctatttccagagtaaatatctctggatcattaacactattatacgttctattcttcttttctagcaagcaagaaaacaaaacagttcattttttcttaccattttcttctgttctttttttattccagataaagtctcgttatctcatccatgaaaatagttttgtcctcattggtcatagttccactggcaaataaagcagctgcctgttcaagaatctgccttgcctgtttagcaccagaatattcacttggctcatcattacccaagcacacggtttcattatcattcataagataagaaacctgacactgaaatgcatctgccagtttttgatataaactactctgctttggatatcgtccatcaatttcccaagctcgaattgttctataagaaacgccgaccatagcacccagcttttgttgagtcatttttttctcttttcgcaactttctaattttatcaccaaatgttgtcataagtatacatctttctcctatgagttttgtacgtgcttttttaatcacaataaaagtatatcattatgcaaacgaaaagagaacccgacatctcaagcaaatttgatgatgcaggttccctctttatagatcaataccttttattttttcatcttatgatctgatggcagtctcacttcttaatgacaactgtggcttccacatccatgctcgccacatgtatgtccttccccgtggttgtgctcgtgatgagaacatttcacatccggattatactcaagtgtttcattgataaaagcttctactgcttcatccgcatatccggaaactccgccaaaaagcttaatgcctgctgccgctaatgcggtctgggcacctcctccgattccgccgcagatcaagacatcggcatttaaggcattaagaactcctgccaacgcaccatgtccgcttccattcgtatctactacttctgaatgtactacttttccttcctctacatcgtaaatcttaaatgtctctgtgtgtccaaagtgctggaaaatctgtccattttcatatgttactgctattctcatgataccttctcctttttctgctgcatattttttgtaaatttcctgtttgtaacatcctccaaagctgcagtcgctactctgaccgtcacaaattctgaaatccccgccctcgattctaagcggatgcccatcaatgagtgcatctgctattttcttcctagcaatctcgtaaatccgttgaactgttgttcttgcaatctgcatagatactgcacactgctcctgactataacctttcttgtccaaaagacggattgtctcgtactcatctaccgtcagaacaatgggtgtttttttgtcagtatcgtctgccggaagaaattctaaaacattggggaaatgacagacttttctgcattttactggtctcggcataaactgctcctttctcgcttttcttatataatagtcctataaaaggcatatgtcaataatgtttttgacatatgccttttataaatcgccttatagtattacttcttttcattattttttaatttacagataccctgcgtcattgttcccattggacaaaatgtacaccaggttcgtggcttatataacaccattacgatcaaccctaacaacaaagatgtaagcatcaaactataaagtccaaaactaaactgtgccacccaatcagctactgttccggcagtgtatgtccatccccacggaacacggaaggtccagaataatttgatgatttcacgcaaggatgatgctccggcaccaactaaatatgtctgaaataccatatttccaaacattgtaaggaaaaatatcaaaaagccgtatcggaaccattttgaactcatccatcgcggggttggtttatttcttgagcattttaaatctccaccaagcttactaaaaagctggccacgtccacacaaatgattacagaaaaatttatttccaccgaatattgctattcctaacggcaacaggaaatcaatcatcccaaaccaagcgaacaaaatactaaaaaaaccgagagcaaaataaaggattgcccatatccataaataatcataccaatgtttctttttcttcacatcgctgtcctctctttcatttcaatacaacctgccggacaggactttgcacattttccacatcctacacacactgtttcttctaccacagcataacatccatggtaaaccttggccgctgccagcggacaagtattttcacatactccgcaggcaacacatctttttttatcgacacttgccactctttttgccaatgctttgttcccctttcaaattttgtatctctattgtacctgaaaaaggtaaatccttctgtgatattattacataagaatttaccttgaacgctaatcattacaatgacatatttttattatacattacctttatatttatatatgatgtttagaatttcctcagttgttcgaataatttctttttgtttttctttcattgttatagatttgctttcttcttcagctaacgaagagtaaaggtgaatggtattagcatgatgccatatctcatcgcaaattttctcgatttcatcagcactccgaaatgcctggtctgtttgcatttgcaagtgttctcgttgctcttccagatgattcatccgttcttgtaactgatccctttctttctgcaatcgatcatgttgtgcttgcagttgatctatttgtattttaatttcactcatcttttctttctgtctccgcataagcatcatcaaatatacaattacaaataatagtattatgtacagcataaacttctcctcacgacacatatatttcgacggttttccgcaaatcaactattgataatggcatagaaagaacagttagttttcctgaattctttttaatttcaacagcatcaggattgcctgtgattaaaattacaggtgttgtcctgtccgcacgccatggctgattcggttggctcgtcatatcttcggtaacaatccaaagatccggcttatgtctgtctaattttgttttagcgctttccggtgtataaaacagcatgatctgctctgaaataaactgcaatgcttcttttaatccttttgcataacgttcactgccacagaccagcgcaataatagaagcagctttctttttttgtgttacctgaataaaatccaaaactggtgtattatagagactaaagtctttttccaaatgaactttatcataataactctttgctgccttgcacatcctcagacaaaactgttctatgtctatacgaatatcgtttccgttctcctgtatgttcatactgtccaactgacaaactgacattccacagtttagtccaagatgaaagcgtatattattttcatcattcaaaaatcctttattttgatgaagatattcacatcgaagctgccaacagcgttctccgcaaatatatggcttttcatcgaattgagatagtttaaagtagtcccctgcatattcatcaaaccagcgaatatactgggttcccacatcacgggtcggattctttttccgatccagcataacccggccatctcgataatgtttaacaatttccgggaaagcaatacctccgcaaatatctggcaaagtcaatgccaatgccagtgcagactgccatcgtctatctacaatattcagttctacttcttcgattcggtccaaaaatgtaaaactgacatctccctgcattatttatccctccctcatattcacaacagtcatgtactatagtcagtatatttttatttatggcatatgtcaattatgtaattgacgcatcttaaaaaagtaagtatactatgttcgtaaaggagataactgttatgagcttcgaaaattattttccactatggaatgacttaaatacagtacagaaaaaagtaatttcagacaatttgattacacgggatgtaaaaaaaggaacgatcattcacaacggaaacctggattgtactggattattactggttaaatccgggcagcttcgaacttacatactttcagatgaaggacgggaaattacactttaccgtttgttcgatatggatatgtgtcttttatccgcctcatgtatcatgcagtccattcaatttgaagtaaccattgaagcagaaaaagatactgatctttggatcatccctgctgaaatctataaggacatcatgaaggaatcggctcccgtcgcaaactataccaatgagttaatggctacccgtttttctgatgtcatgtggctgattgaacagatcatgtggaagagtttggataagcgagttgcttcatttcttttagaagagacctctatcgaagaaacaaatgaattaaaaattactcacgaaactatcgccaaccatcttggttcccacagggaagttatcactcgaatgcttcgatactttcaaggcgaaggtctcgtcaaactctcacgcggcaaaatcaccatccttgattcgaaaaaactggaaacactacaaagatcataaacctgtttttctataacatctaaagaatcctccatttatcagaattatgaaagtcattctaataaatgggggaatccttttatactacgtgaaaatcgtaaaatattttgtttatttctaataatccataccacatacatatgacctttcgatcagtacacggtcattaaccactacatcatagaagcggaatccgccggagaagttgtatgtttcatatccatttccttccagaatacgactggcaatataacttcgcagcccactctggcatatcagataaacaggctttcctttctcaatttcattgatgcgttccctcagttcatctacaggaatatttttgaatccatccatatgccccctgttaaattcacctacagttctcacatccagcaatacaacacttttatctttagaaatcttatccatatcttccagatgccattgttttaaggtaccttttgctatattgtctatcatgaatcctgccatatttacaggatccttggcagaggagtatggcggtgcatatgcaagatccagatctttcagctgagttgccttcagccctgcatggattgctgttgcaagcacatcgatacgtttatcaacgccttcatatcctataatctgagcaccaagcaagcgatacgtatccttttcaaaaaccaccttcatggtcatcacttttccacctggatagtaaccggcatgactcataggagaaagaattactgtatctacctctaatcctgactttttagcatttgtttcattgatacctgtagtggctgctgttatatcaaatactttgataacggagcttccctgactgcccagataacggctatcaccgccgcaaatattatcagcaatgatccttccctgtttattggctggtccggccaaagagatcagcgcatcatcacccgtaacataatgttttacctgaacggcatcacctgctgcataaatatccggtacagaagtttccattctgtcattcactacaatacttcccttgatgccaagttccagaccagcttcttttgctaatgctgtgtctggtgtaactccgattgccagcaccaccatatcagcctgaagggatggattatctttcaacagaacctccactccgttgtctttttctttaaatccttctactgtatagcccagtaccagttttatcccatactttctcatttcattatggatcatggatgccatatccgggtcaaaagggttcatcagctgcttaggccgctggacaatcgtaacatccatgccaagctccctcaaattttctgccagttccagaccaataaaaccgccacctgccaatacagccgattttggatgattcttatttatatattcctttatccgaaaagtgtcttctacagtacgaagtgtaaaaagtttatcaatacctactccgggaagtcttggctgtgttggctttgcccccggagagaggatcagcttatcatagttttcttcaaatatctcatcattctctaaatttttcactgaaaccgttttacgttccggatgtatggaaataacttcatgatgaattttcatgttaatacggaagcgtttaaaaaaactctctggtgtctgtagtgtaagttcttccgggtctgtgatcacgtctccaatataatatggaagcccacaattcgcataggatatgtatccagatctttcaaacacagtaatttctgcatgttcatccaatcttcgtattcttgctgcagctgtagctcctccggctacaccgcctacgattattaccttcatcttatttttccacctttcctgaataagcagcaatgccaccaatattatttactttagaatatcccattcgttgcaacatcccagttgcttgacgacttcgggctccggaataacagtatacaaacagcggtatttctgtattcttcactactgaaacaatattgttaagttgttgtaacggcacatttttactttctggtatatgcccttcctgatattcctgcggagtacgtacatccagcagaactgcaccggcagtccttttatattcctctattccttgattaatattcgcctgtttaaagaaatcaaaaaagcccattagcgcacctccttaaagcatttctaaaatcgcattcttaggtctcgcccctgaaacctgctgtacaatcttcccattcttcataaccactaaagtcggaatgctcataatactgaacttatttgccagttcaggctcttcatctacattaatctttccaactttaatatctctacgctcacttgcaatctcctctacaataggtactaccatgcggcaaggagcacaccaaggagcccaaaagtctaaaagaacggttttctcggaatccattatttcattctgaaaattatttttattgatattaatagcagacattttacagtcctcctcgttttttcttttatggctttattataatctgaattttatttgttttctgtgatatcatcacattattatcatgatttgttttttaagaatttattttttcatcttatgatctgatggcagtctcacttctccggtccttttcttcataatagaattctgcgtctccatctgtgttggaatataatcgctttcctgcagaaatgcacctgccgcctcagcatatgattcatatccagctgctttcattctctttaacatttttgccaaagcactgttcttgtctctactcacctgacgtgtgctgatgcccagttccgctgctgtttccttaacttgttttcccataataaaataatcgctcacgattttcttttccttctctgtcagatcactgaagagttctttgaagaagatctctgttgtgatatctgatgcaatgtcacgtccatcatctgcgataaagtctgtcgcacaactgttttctgattctaatccacaaaataatactgtattatttctctgatgctgctgatcgaacatataatgttccttattataagaaatattaagaacttccagctcttctgctgtaatattagcgtatttcaccttctgatatctgtcgtaaaatgtgtattttctttcttccatgattgttcctccgatttgtcgtttttgttgatttgtgacaaatcggaaatcatggatatctggcataatgtctgcctcttccctgcatcttgatatgctcttcctttccggcatctacctgttaaaaaggaagctttttcaaatctgcaacctgttttttgggtataaaaaaaggccatgcccttccgggcacagcctgacgccttaaaatttgagaaaagaaaaacctccgcaaacattacgtctgcgaaggtctatttctctcagcatatcaattctaacatgcatgtattttcattgtaatgccattcacatgccagtttactgtcagttcactgccactttactcccacttttcttccagtttatttcctccatcttattctgtatcttttccggacgtgtaaatgcccagagcattgttgcatacaaacggattgctttcttacggtttcgataataagtggtacttggcatatcatccagcatcagcatcacatcttcattggtatttcctgcttcaaaatatctatatttcaaaagccgataatacagctgtccattcttcggataatccctcaaagctatcagggaatctctcatgatttccagcaaacagagattcatatcattatttagaagcttttcctggattctgcgtttctctgcagtcgcatcgaaatctaccagatcatataacatttccttcagatgcttcccttcttctgcatacatttcataatctatatccacaagattcttctcaatacggaacattaccttggtatactgactcaacaataattccgtattcttataagcatcctctgccacttcttccatattgataaacatatcctgtattctctgcataattgtcctccttcccgaccgcttccgcagccagaccaatcattgtattgtttattccattcacagtctgtcactgtcctaacatctcttcatgcagattccgcagaaatatctgctgtgggatagcttctatttctggctgaccggcaactgtatgatctattgaaagcaatcggttctcacgggaaaggatgtatccccgactgctgatgttctcatcgaatatctatctctccaaagggggccctgattcagggctcccttttagggcaccgttatttacgttccataaaccatttataattttcttcataagtcagatgacagattttcccgcccacctgacaggtataacgatatccggttccgccagcttttcgactggcacaacgctccggttttgaaaccttatcaatcgcatacttacgtccatcttcccagacaaacgctgtagggatcaattctccttcccggctgaataccgccaggacatctacatacactttagctgtcattacaaaacacctgctctctcctatccatgaaaatatgcttgtggatgaaccgtgtgttccttagcattcagctgtgccagtatcttatcctgatacataaatgctctctgaatactctgataaccaaatcttccacggatctcatctgccacctggtccatctttttgattttttctctttttgtttcatccataaataaatcaagctgataaggcatctcttcagacaccagatcacatcctcgaacaccaagactacgaatcggatgttcccagttataatttttctgaaataactcaaatgcagttctggcaatttcttctgtaagattacttgccctgtccaacttgcactgtctcgtgaaatggtacagtccattatcccgaatcgagatttctactgtcctgcattgaaaaccattttcacgcaacctggctcctacactttctgaaagcgccatcaaaataatcttcacatccaattcactaacaagatctcttggtgttgttgtgctgttcccgatagatttgattggtgctctatatccttctactgaaactggagtcttatcccatccatttgcaaaggtatgaagtaccaatcccatctttccaagatatgtttctaatatagaaggttctgcccctgccagatcgccaatcgtacaaatgccaagtttcttcatcgtccgttcagtgcttcttccaaccatgagtaaatctcctactggaagtttccatgcaatatccttgtaattgtctttggaaaactctgtaatggcatccggctttttataatcagaaccgagctttgcaaatatcttattccaggaaacaccaatacttacggtaacacccagttcatatttaatccgactgctgatctcttttgcaatcttcattccatctcccttgatagaagtactggcggtcacatccagccagctttcatcaatcccaaatggttctctctgatctgtgtattcactgtaaatctcctgtgccattctggaaaacctcaaataaagatccatgcgaggcggtacaaaaattatttccgggcaaacctgccttgcctgccacaatgccatacctgtttttactccggctcgctttgcaatataattcgcagtcagcacaattccatgtcttgcttccggatcgcccccaactgccatcggctttccggcaagttccggatgatgcagcatctcaacacttgcgtaaaagcaattcatatctgaatgaagaattgtcctgctcataacattcacctaccagtctaaaaatcgtaataaaacttctttgcttcatattgactttgtgaagtttttgaattataatttctactaacttcacgaacgtttgtttgtattctatacgtgataatgaactctgtcaatagtttttatgaagttgatgaagttacgatttcaaaaacttggaaaggatcccactatgaatttttcagacaagattaaatttcaacgagaacaaaatcatctgacacagaaagaacttgcagaactggtcggcgtatcccagcgtgcaatcgcagcttatgaaagttccggcacaatcgcacgaatctctactatgagaaagctcgctcatgcattaaatgtctcttatgattatttaaaacatgatgagatcacagatccttcttatggaattgaaaaaatggattatattgatgaagtcaatggacagcttggtgaaaaaggtgccagggacatcaatgagattctcgaagccaaccgtgctctttttgctggtggcgaactcgatgaagaagcaaaagatgctttctatcaggctgtaaccaaagcatatctttcctgtaagatggaagctaaaaagacatttggacggaaaaagaaaaacactgaaacggaaagggattcataggtgtccgtattttcgtacagcacttttgctactctatacttgcagcaaactatcttatgaaatatcgaggtgtttttatgagttcaaaatgtataagagacactgttagtaaagtaaaaacaaaatatcaggaaagtgatccgtaccgccttgcagccgctatgcatattattgttaagaagcttccgcttggaactgatccaaactgttgcaaaggcttctgtatgcgggaatgtcgaaagacctgcatcgtcattaactgcgacctgccggaaatcatacagcagattatcctgatccacgagatcggtcacgcactccttcatcagaaaacccttcagatcaagtgttttcatgattttgaattattcgatggagtatcacaatgtgaatatgaagcgaattgctttgccgctgattatcttctggaagatgaagatgtactggagatgcttaacgccgatatgtcctttttccaggctgccgcagaactgaaagttccaccggaacttcttgatttcaaattccgaatgatgaaacgaagcggcgttcagattgtagattctccgattacttccaacagtgactttttaaaagatatccctacttcgggaataatagaaaattactaaatatgctatttttgaaaaaggagatttttgaaaatgatcaacttaaataaacatagaatagactttggaaaaggggatgtaggcattggtgtcatcggtaacactacagattccgcacaactggcattttataatcagagtgcacgtcccatccatatactcaagaatccagatcagaatcctgggttcgaacccatggaatttaaagaagaaccttttatcatgagcttctccaatcctgaaagcattgatgcagttatttcaattttacaacgtgccaaatatattaatttcacttccaaaaacgaaccgcaaaaaacagaatagatgaatgatgtatcttataaagaatggctgtcttttctccaatgagcaggcagccatttctcatgtaattctttaatacaagtctcccacatatccatctgcttccagatgcatatagcactcgtccaccttctctgattccagaatccgcaaaacgtgttccatacctgtagcaagttcttttgtttttaactcttccagcggaatccaataaactcttccttcctcagaactctttaattctccggtaaacttatccgctttatacaaggtaataacatagtgcactccgctcttatgccaatgatataatcctccaagcttcggtgcttcaaccgtaagtcctgtttcttcccagacttcccgaatcatagatttctgaaaaatctcatttgcttctacgtgaccgcctggaaaagttgtaccggtatagctatcatttactttatccagagccagtacattccctttatgatcctgaatcatacacatattcataaaacagaccttctcaatctgactctcttctttttcattcagagattttctgacacgtttgttgatatccgatcgtttggatttataatgcttgaagacctctccatacggaatccagatttctgcatcttcaattttttcataaacagaatccaccacttcttccagatgtttgtcactcggaaaagtacattttttcatataataatctctggttgcctgaaacatccattccgcaatcttttctttctgcttcatttttaactgggaatacttcttattcgtttgcagtaatctcccatctatcatcttatggtttttccgtgacatcggtttgacctcttttcttctttttcattcagattttactataccacagaatcatgcttgcgtcatacttctgagcttcgatgtcctctttttcttctctcagtaccttatttatagagggttcttttttaagactctcttccggcggctgtgccaccggtaaatagcaaggacaggaagtgtatatacacttccggaaaaccagcaatttagggaaccctgccctaaattaaaaacacagaagtcactacttcgaagaaccaaagaaaggagaatctgcctatggcaaagagaaaaagaaatatacagattttgttttgtgtttccccagaagaaaaaaagcttattcgtagaaagatgattgaatcaaagacaaaaaatatgggagcttatcttcgtaaaatggcaatcgacggttacatcgtcaacaccgataccactccactgaagaaacagtatgaggaaatgcataagatcggtgtgaatattaatcagattgccaaaaaagtaaacagcaccggtgatctgtatccggaagaaaagcaagaattaaaagagatggtgaaagaattatggcgtatcttaagatcttcccaattaaagtaacagacaagaaagctctggactacatcacgaatccagataaaacagaagaaaaactgttagtttccagttttggctgttccccggaaactgcagatcttgaattttctatgacaagagaaatggcaaaaaagaatggaatggacaaaggtgataacctggcatttcatctgatccagtcatttaaacctggagaagttgatgccgaaactgcccatcgcttagggcaacaatttgcaaacgaagtactgaaaggaaaatatgaatatgtgataagcacccatgttgataaaaatcatatccataaccacatcatctttaatgcagcaagttttgttgatcatcacaagtatgtttccaataagcggagctaccataaaatctgccggatcagtaatcgtatctgccatgaaaatggacttgccaccagtatgccaaccggagaaaaaggcaaaagttataaggagaacatggaatatcatcgtggcaccagctggaaagccaagctacgtgttgcagttgataaagcaatctggacttccatcaactatgaggaatttttacaaaaaatgcagttagccggatatgaagtccgacagggaaaacacctgtccttccgtgcaccggaacagaaaaacttcacttatatgaaatctcttggaagctattattcagaagaaaatgtccgcatccgtttggcaaaaaaccgtaacaaaataaaagctccaaggcatctgtccagagaagctcgcctgtatatcaatatctccacttatgttacgaccggcaatcgagaaggatttgaacgatgggcaaaactaaataacctgaaagaagcggcacgcaccttcaactatctttccgaaaataacctgctgaattatgaagatttccaacagcatgtttctgatgttgatgcttctgttaaagcggctgatcaaagaataacgcaaatcaacagtgagctgagcacacagaaaatcattcaaaaacactgtgattcttaccgtctctgccgaaaagtgattgaagattgcaaatctgctaaaaatccaaaagcataccgaaccaaacatcaagcagaataccaactgcacgattcactaaaaaaagagcttcaggatctcggtgttaccaaaatcccaagctctaataaaatccagaataggatagaaaatcttgaatctgaacaagctgctactgtccgggaaaaacaagaattgcagaaaaagcagaagacactgaatatcattagacagaatttcacagcactacttaatgctccggagatgcaaattcccatatcagaaaaagagctaactctctaaaaagaaggaggtacctactttaacggtgcctcttgcttttcgtctaatctatttatatcttcctctttatgcaatttcccatattacagttgccgtatcagtaacattaatatcgtctgcctcaatatctatatcatatgctcccggtgcactcatttcacattccgtacactccattaatctcatttcattcaatggctttgttacaaaatctatctctccccaagaataatcaattgcctgtatttcacccaatttcacatttgctgctgttgtaagcacctgtgccttttgaatggaatcctcgattgctttatgtaacagctcatttttacatttttctacatctgccactgtatactcaatagaaaactctggccttaatgagctatgagccaaagcgtaaaggacttgccctaatcttttattatcagctgcaaactctattttcatatggtgattatacttataacctttaaatcttcgcttccagctcttatctctgtcctgatagctttcatattctgtatcgacattaaaatatactgttttaaggtcttttctctgaaaaccaagtttctcaaacaaatccttgagaagctctgtatcttctgttgaccttcggagagtatcttcatattctttgcaaagttcttccttgttgacatataaccggattttatccggctttactgctattttcccttttcctgtaactgcccgaaaaaaggacataaaaaaatccctccaaatttaaaaacaaattcagagggtaatttagggtataacaaaataacccacccgaatatcgttttttttatttggtgagtttgttctttcaaatacgaaacaaaaagagccgatgattcgtgaattgttccacaatttcatcggctctgcgtcttaagcgtctggctctttgatgacagttatcttcaagttgtcaactttaatcaatctttcttgtctgcattttggacaataaaggggataattctccaaaacagtgtccttcctaattttattacgggttttgctcccacaaacaggacacaatatccattcgcatttcatcataattagtctctaatcctttcaaatctcattttatatgacttttgcaagctgttaagctaacttgtggaacatatgccgaaccttatctatacggctattcgggcggcggggttggcaaataaatttaccaatagctggctggtatccttttaactctgtcaagcagactccctgcccatttgtgaaataagttaaatcgttcctgtattcttgaatacatctagcagggatttctcctttcagaatgacctcgtcattctttatctgagtacttacaatatctgcacaataccttggagcatcatgatacgcccgtgagagatattcctgcggtgcataaatttcaaagtggagatatggctctaatagttctgtccctgctttttttaaagcctgctccaatacgataggggaaagcagccgaaagtctgcgggggtacttacaggactataatacaatccatattcaaaacagattttacagtctgtcactttccatccatacagcccctgctcgcagccataaagaaccccctccataaccgcattttggaacgattgatttaaatatccaagtgaaactctgctttcatactgcactccgcttccaatagggagcggctctatggacaacccgacagaagcccagaaaggatttggcgggacttctatgtggatggtatattctgcttttctaagcggtctttccatatatataacagtaggctcttttatttctgcctccacatgatatttttcctcaaggatggcacaaatgacttccatctgcacattccccaaaaaagataacataatctcatgtgtaacagtatcaatgtcaaaatgcaaaagagggtctgtatcagcaatctctgcgagggcatttaacagggcttccctttgctccggcttttgcggctctaccgttgtccgaagtaatggcatgggattatcaatccatgttttgtgaggcaggagtttttcatttcccagaatgtcgttcagtttcaaagtatcatcagctaaaataacaatttctcccggacaggcatggtcagccgggacgatttcaccatttgacggaacacacatctctgtgatttttattttctctttttcagatattctaataacatccctcaaatgcaatgttccgctatatatacgcacataaacaaaacgccgccttttctctgaatattcaatcttaaaaacctgcccgcatagttcagattgaccttcaggcgttgatgaataaaatttactggcaattacttctataagctgccgaatccccagattgtttttagcgcttccgtgataaacgggaaataacgttccgttttggaatctcctgttttcttcctgttccagttctgacattttaaacggtttccctgacatatatttctctaatagttcatcgtttcccataattaccgcatcccactgttccatatcgtcattgtccgttacatttatatggggatgctgcccaaccttttgcttcactataatttccgaagaaagctttgctttcatttcccgatataccattggcaaatcaatcccctcttggtcaattttattgatgaaaaaaattgtcggaatcttcattatctgtagtgcatgaaacagtatacgggtctgtgcctgtatgccatcctttgcagaaactaataatactgctccgtctaatacggataaagaacggtatacttccgccaaaaaatccatatggcctggcgtatctataatgttgacttttacatcctcccactgaaaagatgtcactgctgtctggatagtgattcccctttgacgctccaaattcattgtatctgtccttgttgtgccttcatctacgctccctagttctgcaattgcaccactggtatacaataaactttccgttaatgttgtctttcctgcgtcaacgtgagccagaatgcctaagttaattattttcatgtgattttcctcctatcaacacccaaaaaagggcataaaaatacccagtgataaatactcctatcactgggtaaataactccaatagccccaaaacacttatatgttttcgggcatataaaattacatgataaaagtattcttaaactgggtacaaaaaactaagccccatattaaaagtgaaacgggactgctactttttgttcccactatcaaattgacagtttatttaagaataccttgccgcatatttattaactccttgtataatactgaatctaattatattccttaaccctttatttgtcaagctgacaaactaaagcagaaaaagcggcaggatttccccctgccactaatcatctgtttatgcaaaaataatttccttttccacaatctccctcgcacaagcccttatgttattgaggcatcctgtccattctaaggcgttttctgcctttagctgttccgttatgccctgtgcctgtttcataccctctatgagcctttcaaagcgttcctgtgcctgtctgttgatgtcggcaaggtaggcgtttagcctgccgcttgtaagaagattggtgtatgtaactttacggtactgttttagataatctaaatgccgttgcccccagatgcctattgcctgttcttcttcggcgggtacagttaagcacggtatcaaataatccccttgcctttcgtatttgccgcccagttcctcaaataatgattttgccattgtctgttacctccacattcttttttattttgaatgtccgcaaaatccgtcctacatctatgggattacttggaagattccagtgcataatcacacgacaataattatgaaaatccaatccttcctgtccgattgatgttgtggcgagcacaaatggacgcattggtgagttaaaggcatttctgatattttctttacgcatgactaccttggaattatctcctgcatcctttgtaaatccaactgcataactcgaccttattcgacatccatcactcttcctgtcagctccgttaatacgttttttgaaatcaggataagtatcagcgatataggtggctgtatgtatcttcaatgaatccatcatcatgtcatgcacaatctgatactgatttccatccgactgaaaacctgctgtttctttcagcatatggatatattcatcaatcattgcctgaaaacagccatctttacagtatttaagtacattctgccaatgggaattatcatccctgcatctgccataagcaagatcaatgatagctgttgactccggcaaattgaaattattgacaaatacctttgcaagcgatgttgctctggctgtgcttcttccattagaacgataaatgcatattgctggcgaacccagtaccatatttaccaatgtttccagaagatcctccggctttcttccaagatgaatctcctccggggcatccaaataacttcttagcttatcaatatgagcaataaagcccttatttctcttatcctttgaactgcttctgacctcagatgttgtatcctcttcgtctgtattcatttcccacacaatatcctctatccaatgctttgcatagatgactccatccatgagcatcggtgcaagataataccacctggcatcttccttattgttacccgaatcaccatacttttcttcgattatcgcaagcttctctttcagtttcagccgtacagatttctctattacttctaatgattcatgattattcaatgactcaatcggtaaatacatatcagaaagtgtctttgaaggataaagcaatgcaaacaggctcatgcctcttacttctccatttgaaacattaaacctgagccttgccaccgggtatcgtctcgaaccatccgcaaaataccccgtattcttcttatcctgattctttatctgatgtaccagttttccaactgtaagtctttccgcctcataggaaacaagcgcacctatcattcgtggaaccatctcccatgcagaaaatacaagtatttttgaaaagcctttgctgtttttatatgctccctgcatctcataatatggcagtgatggaggaatccacagatatttttctgcaccgccggtaaatgctttttctttcagtgcctcaagccttgcattggttttcggcagttcatcatatttattgattttattgcgattcagccacaagagacattgttctctttcacttccaaattcatctggatgttttatataatatttttcaatctgctctttaatcttatatttcttcataaaggacataagatacggacagctctttgcataatctaccggtaaagaatgatttgaatccgtttttgacaacaatcgtgacatctgtatataggagtttatgtcattttcatctatctgcaaatgatgcttcacgctgctgtcatccgtataatcaccggaatccatgacagatatacgctctgtcctgctgactccctgatacatggcattttctgccagctccttcatacggataattgcactgtcccctgccttcaactcacttagagcatgggaataattcttccacacttccttaaatttaatgtctttgacttcatcatcaaaaagaaagttcataacctgaaaaaactctgcataatgctcatcaagctgattttcatctatctcttcaagggtagaatacaatttatatggtgtagccgacaacagaagtacccttgtatcatgtccactaaggaaactgtgtgcaagaataccaagctcactgtcatcggatgacaaaagaaacttaaatctctgaaactcatccatgattaccagatccggctcaagcatagatacactgattctcgcaaacatcacacgaagcttattcatcacatagtaattggaatatgtaagctgtttattgtatcttctttcatgcaaatgattaagcagcatgtcccttatactttcatactcctgataattaaggattttttctatcacattttgtggatagacacccttcgtcatcttttcgcattctgccacacgattttcaaagttccattttgcccatccatcccatgcttttacagcatccattatcataaatttttcaagagaagttacatgtcctttaaagtccggcattctccttaaaatggcatacataagtgctctttcctgcacacttccacctccggtggtcatgcggaaagatgtttccggtgtaagtgggataagctgtataaaaccttcctttatctgcggatcattttcctgctcagtaatctttaaatgctgcatagacagtctggtatctgatactgagccgatggcattctttcctgttacatcaagttttctgatattctgatttgctatgttctgattagagcagatataaattaccttaaacagatcatctttctcttcgattctaagtcttggcataatcattttccatctgaacaagaactttatccatctctgtaaaatgagtgccatacttttcgtttatcttatcaatgattactgtcaacgggtctttcttaggctctctatgaccggaatcaccggagataggtgtatatccgccttctgtgctttcaagctctatcggaccttcaaagtctttttccagcttatagtattcaagaagaactttgtcatcaatatttatcttctctccaccatgtcccttaggaagcattgtgtataagaattttgaataaatactgaatctatgaatatccttgtcaaataatctgcatacctgtgtaatataggcatacacacggttaaaacttgccaaggtagtctccatcttcccataccacttacaccttgtcctaatccataaaaaattcgtgcactataacacatttgcatcatatacaaataatactttggacacataccattcttatcatttaatacaaaaaccctataatcaggacttgtaactccttcgtactttgaaatatctacccaaccggtcagcaaatccatatgattcattgcgaaatcacctttatggactaactgataatttgcatagctatttgcaaactgtccttcattgttagaaaaatctttaggaattattcctctttgtgtaattgacaaaacagtatgtccttcttctcctgcaatatctttctgaatatggaatacatactttaatcttttcatttcccaatttataggaatatttccaaaccatacacttccgctatccttcatctctacatctggatttattccactggttactgcttccgtaataattgataatttgtattcctctaatttttcaattatcaccttctgcttttctacaatttcatcaatctttgaacacttggcatccagatattcaactattttattttgttgttctatatttggtctaaccaacggaagtaaaaataacttgcttgattttattccagttgctgttgaaccagtagataatgaatgtaaaaactgctggaatccctcgttcaacatccaatacttcaaataatagttattaacagtacttaatgctctaaattttataatacgttgtgctaaggcaatatcagttctatctacattagccacttgccccaatggagcctctgtagtaaatagtatatcgccaatttgtggtattcctcgatgcattatctcctcataatcggcttcacgaacgtattcttttgataactcatagcatattttcccatcttttatattctttgcagttactaaaaaagttccttcttctgttttttctggtgtttttcccctataatcgacaattgaatctaattgctttgttaagggaacaatctcccaatcttttggtatcttcccaatccattccactccactatccttcatctctctcataggtcaaatacctcctcaagacttccagatagttctgtctctaaatccataatctctgccataatttctgctgatggtcttggagcttcatacttatagaaatatctcgtaaacggaatctcatatcccacctttgactttttctcatctacccatgcatccggtgcaaatggaagtacttctctttcaaagtactctttgatatcctcttttaacggaacattttctgtatcacgaagactggtatccggctgtttctttccctttttcaataccagattgccttcttcatcacgaagcggtctttctactgtaatcttggtataaccaaaatcctcgtcatcataaatctggctgatttcactctctttaaaatcaccatatatctttgtaatctctgcaatatcttccttagagatatcatttcgcttatttcctaatgcctttcttctcttcacgaacatctcattggcattgatcagctgcacttttccttctctgactgtacctgcctttttatttgacaatacccagatataggttgcaattcctgtgttatagaaaatatcattcggtaaagcaatgattgcctcaagcagatcattttcaagaatatatcttctgatttcagaaggtccgcttcctgcatctcctgtaaaaagtggggaaccattatgaatgattgcaattctgcttccacctttatcaatatctttcatctttgatattgctgtcataagaaaaagcatctgtccgtcacttgtagccggaagtcctgctccaaatcttcctccgaagccaagctttgcctcttcctctacttttgccttttcattcttccactcacgtccaaacggaggatttgaaaggatatagtcaaatgtactgcctgcaaactggtcatccgataatgtgttgccatccttaatgtaatcagcattgttacccttaatcagcatatcagccttacagattgcaaatgtctggtcattgatttcctgaccgaacgatacaagctctgtagatgcattcagactatgtaaatattcctctgctacagaaagcatacctccggttccacaggcaggatcataaatcgtctttgccacattattgccagaaaggatgtcattatcatcatagaagagaatattaaccataagttggataacttctcttggagtgtaatgctgtcctgcatcttcattatgagactcagagaatcttcttataatttcttcaaaaatatatcccatttcaaggttagagatttcattcggatgaagatttcctctgtctgttgtatattcctttaaaacaatatacagaatccccttatttgccatcgttgtgatgtgtccatcaaacttaaatttttccagaatatcccgcacatttgctgaaaatttattcagatactctctaaaattctcctcaatgtggtcaggatcatccataagtctttcaaatgtatatttacttgtattgtaaaaatccttttttgaagccttacgaagtaaaatatctttcattggaagattctttacttcatcgtatttctgtaataccgcatccttcgtatctgagagaatacagtcaaaacgtctgattactgtaagtggtaatataacatctccatattcatgtggtttatatacaccggtaagcttatctgctattgcccatattaggtctgctttctgatctatttttgcacttctcgtagccatttacattttcctccataaggtaatttacttttctttgttatctggtacatagtcaatcaaatctccaaagttacaatccaactctttgcagattttttccaaaacagatagtttcaccgactcgcagtttgtcatctttgctattgtactggagctaagaccagtcttggcacacaaatctccttttttcattccgtggtcaattaactgtttccataatccattataactaattgccatcctcttttcctccgtttaatgtgcaatcaatatcaaaattattttatcacacaaaaaactccttgtacaattcgcatttacaaatatcacatatcttttttcaaatattgaatatcttttttaatttattcacaaaccttttgaatttatctgctacagatactcttttcctaattgatgtggttagaagaaaaacatctccaatctgctttcattataacgttcaatccatatttacgcattaaaaaaggatgcagggattgactccctacatccttcattagaattataatattatacttatctcacaccccgatcagcccctctctccggcttatcttttccctgcttttcttgaataatcctcttattaatctcaagccgttcatgaatggataatttcttatcttttccaactaccgcctgcttctgttgtacctgtttcctatctgcttttcctgcatccttgaccactgcattcgcttcggtacttgttccccgctcatctgctcttccttcatttctttccgttatctgctgttctcgtctctctttcacacctttttcttccagattgcaaaagctctgcagatacggaagcacatgattctgcatgtctgtcagatcttccatatatttttggaactcttcacttcctttacctttctggtaattgatccaatactcatctgtaagcttcatttcattatcatacttcaactgactcacaataccgccatgtccatttccaatatctattgacttcttgaaatgatgcagcatctgttcacctttttccgcataatatacagtcacatatatctttgtgatttttgtaggttcctctgtcttcgaatcacgttttgcataccattctttatccatttctgctgtttttgcatccagctcggataacttctgacatcttggattcatgagagcactttcttcacaatagtttacatacaccattggttccagattctttggaaactccggctcatagactttcagtctttcaatcaatacacctgcacgcacagactggtcacattcttcgtctacaatatccttcagataagaaatataagaatgtgtattgccactctgcaaatccaacatcacctcttgtaccgtattttctcccgtctccacattatctcgatactcatacggatcaaaagcttctgcaatctcatccaatgcctctgccaactgttctgtggtcatcttctctggatacattgcttcccgaacatcccgcattggtacatacttatagtccggcaatgcatcatgaattttctcaatcccttcccgtatcagtgcaagttctccataaaatcgaacatcgtccatcagatttccaagtactgtatttccttttacgattgcaaattcagcatcatcatagtaactgtcttccggatcacgatagataatccccatactgcatactcgataggcattctcaggattctccctatatttttcataaaccgcagcaatctgattaacatcggtacttttttcataagctcccatatcatggaactcatcacattctgcggcaaagtattccagatacggttctttcttcggtggcatattattgaggacattatcaatcatgttataatttgcctcttccagttcttctacctttgccaatggcttatattcgccctggcttttctgaatctctgccattacaacctcatccatttcttctaccttttccatcaactgatcataatccccacggatgcgttctccagtccatccttcgtcttccaaaagttcctctgccgcttcttcaatagaaatttcaccattttcatagacgccaccatccatcaggcggaaatcttcatcgtaaaaggaataatcatatcctccttctgttctctgaatagcaaagtaacgttctcctacctcatatgccagttcactaagaacctgttcttccagattcaggaaagaatctagctgttcaaaactgatactgtctacaaaatgagcggttacctttcccccctcattcagaactacgatatcactgacagacagggaatgtcctcgaaagtcttctggtctgtcgatgttgaatcgttcaaatatatcatctagcgacatatttccaaataattctcccacatagaccagttcatagtcttcttttttaatctgcatcccgtgactttcaatgaagctcatattcataaacgcatagttttcacctggcaaaccatctcttatttgataaataccgaatgttcgtcttgtccctaatagcagatttgcctctttcaaagactgaatctgcggatatttctgcatctcccattccaaattgcggaatcgttccagttcttctgtagacatctgataatgctccggacctcgttcaatctccattcgctctgtaacatagattggtgatgaaaaattggtaatcagatagatatctgctccggcatcatataatttcagagcttcttcctgtccaatcacattcatcggctcctgaaatgctccaaaatcttcatctgcataatccagatcctgatcccttatccgttcccacatctgtgattccatgccaaacagcccttcatgtgcctgtatcatttctttacttgcatactctcccttgctgccatcactacccaggcaatagattttagaacccattctgtgataatccagggctgctgcttttctaagcggcaccatatcctctgctgtatatccataatcccgaagttccagcttgcctatggttggatctggtaagtcctgaatatccatttgggcatcatccagaagttcctctactctatcttcatctgaccgattgactgcatctgccagatttcttaccagcgtccttactttctcttcttcgccaaccagatttgcatattcaaaaatctgttcttttacgtccgctggaattgctattcccatgtgttctgcacggtctatttgttcctgtgtatattcctgcattttctgcgtttctattcctgttatcatgtttctcgccatataagttcctcctgtattcccaaaagtggcataaccggcagaacattctttctaccaaattatgccatctttcctgttttcttattccagaccgaagtccctttttctatcttccctgccattctcgctttcccgctggcttttttctttataaatctgcaatttctcatggatagaaccacgtgccggtcgttcttctttctctttcgattctgactgctctgcttctgtgtcttcccgttcatccatattaagaagggcatttagttctgacagtcgctccagtttctggttcagttcctcttcttttgtgaatggctttccaacttcctctttggcatttgtaagctgctcctgtaccgtttccaatcgttgctccgcttctgccagtttctccggatagctttccaaaagattattgatacgggtgatatttcccagggcatctgctcccagatgaactttcgataccgattcatgcttcacagacaggataaactccttactccagctgtcgaactggattctcatgttgaatccctgatagtttccgatatccattgctgcatcgactgctttcatgtccttgcagactgccagtagtgccgctcctgcttctttcttttctgtaaatactttgccgctgatctccatggaaaactgttctggatctgtgattttatgctcctgataatgggcaatatccgctttgtagctatcaatagtctcggtcaattttgcaatctgctgtggaaaatttcttgcaatatcatcttccagacggtactggttattcatgtgattggcttttaaaagtttcagttttgccacatccacgtccagtgccatcttttcttttactgccggatttccagttgccagtgccttaacctctgcataggacagtgccgcttcgtccacatcttcgcagcttctgaccggtgctttgctcgtcataatctgggagatgaacttctgtttattttcgatcaactgccacatgtagctgtcgaaggtggattctgtcacataccgaaagatatgaacctttttattgtgatttccctgccggatgatacgtccttccctctgctccagatcagacggtttccagccaatatccagatgatgcagagcaatcagacgatcctgcacgttggtaccggcacccatctttgctgttgaaccaatcaaaaaacgaacctgcccagattttacttttccaaacagctccgtcttctttgcttcggtatttgcatcatgaatgaatgcaatttctttttccggtacacctttcgccatcagcttctgtttcaagtcatcgtaaacattgaaactgccatcgcctttcggtgtgctcaagtcacaaaaaatgatctgcgccgatttctgtacaactgtatctttccagatttcatagcttttttctgcacagaccgacactttactgcccggatcgtctggcaatagttcattgaccaatcgctgatccagtgccagttttcttccgtcattggtaattttcagcatattgtctacactagcatctacgccaccgtttcttaccacttccgcacgctctcctaggcttgctacgatttctttctgctgttctgttggtttcaatactacagtttcgtattccgcttccggtactggaagattcaactgatccgaagtcttgatatctgcaatctccttgaacatattcatcagttccgggatattatagaatctggcgaatctggattttgctcggtatccggttccttccggtgcaagttcaatgctggtcacaacctctccaaacgtggatgcccaggaatcaaataatcccaagcccatattctgtaatttgctgttctgcagatatctctgcatgacataaagttccgtcatgctgttgctgatcggtgtgcccgttgcaaaggtaatgccttttccaccggtaatctcatccagatactgacatttattaaacatatctgctgatttctgtgcttcgttctgggcaattccggctacatttctcatttttgtataaaggaacgcatttttataactgtgtgcctcgtctacatacagatgatccactcccagttcttcaaaggtaactacattatcctttttctctttctgattcagcttctccagtcttgtcatcagcgtttttctggtcttttcaatctgctttaccgtatagcggccgccatcctgctcatatcttgcactctggattgcgatttccagatcgtcaatctgcttccgcagcatggcttcctgcctctcatcagagattgggatacgctcaaactgggaatgaccgatgataatcgcatcatagtttcccatagcgattctggcacagaactttttccggttcgccggttcaaaatctttcttggttgccaccaggatattggctcccggatataactgcaggaactcggctccccactgctctgtcagatggttcggcacgacaaatagattcttttgtgataatcccagacgtttgctctccattgcagccgctaccatctcgtaggtcttcccagctcctactacatgagccagaagcacattatccccgtaaagctgatgtgcgacagcatttttctgatgtgggcgaagttcaatttccgggttcattcctgggaaagtcagatgactgccatcgtattcacggggacggatactgttaaaccgttcattataaactcttaccagtctttcacgtctctgttgatctttgaaaatccaatccttaaatgctgctttcatggcatcctgtttctgtgatgccagcatagtttcttttttattgaggacacgaatctcatccccattttcattgacactcttatcatagatacgaacatctttcagattcagtgtatcttccagaatccggtaagcatttgccctctcggttccatacgttgcataggcaaacgcatttcttggactgtctgcatttttcccggtaatccgccactcaccattcacctcagaatattttacctgtatctccttctgtgcaagataccacggagtatgaagcagttccctcataaagtcctgataatccgatggttcaatccaggttgccccaatccttacttcgatttcagatgcttccagttctcttggctgaactgcttccaatgcacggacattcggtgtgaattccgggtgattctctgcaaaggttcttgctgtgtttaacttctccctgacatttccagataaatactcatctccactctcccactggtctgtcagtgggttcttaaatataactccaaccagttcctccgtgattttttcttctgtctttcctgtcagctgtgccatataggacagatccacctttgctctttcattcaatgataatgctaaggcttctgtcgcagtttccacactggttaccgccactgcctttttgatggttcgtttcgtaaacatgtctgcttttcgcttcaatgttccatcttcgttcaggtcttccagagaacacaacagacaataagaagcgtcatcagaaaacgcccgcttgtttgcattacttccgatgactccatactttgctgtgtaagcatcatatacttgattcaatttctcctgctgtttgtgaatttcttcatctgttacggattcttccatctgcatggcaatcagttcacgcaccgtgtctcggatctccaccataccttttacacgttctgcagtagcggcaggcatctttacctgattcatcagagagttaacacggtaatatacctgatcatctacaaccgcataactgtaattacgaacattcggatctgccgggatactctctggtacatcatccagttctgcatccacatcaactgcaggtgccatatttccatgaatattcctgacagcttctgcaagctggacttcaagatcagcaccttctatcggcatacaggttgtttccataccatacggaccggatacctctttcatctcacccagaatcatttccggatggtctgcaaaatactgattgaccgtaattccattggcatcacttccaagattcacccactccggcatctcttttgtcatgctgtcacgcttctggaagaataaaatatctgcactgacttccgttcctgcatttgctttgaatgctgtgttcggcaggcggatggctccaaggagatcggcacgttctgccagatactttcggacttccggtgatgctttatccatggttccttttgttgtgatcaaagctgccacaccacccggacgcaactggtcgattgtctttgccagaaaataatcgtgaatcataaaattatagcggtcatattgcctgtcattcactttataagctccaaatggcacatttccgattgccacatcgaagaaatcattcggataatctgtcttctcaaaacctttaatctggatattggcatctgggtaaagcagttttgcaattctaccgctgatactgtccagttccacaccatagagttttgactggttcagcttctcaggaagcattccaaagaagttaccaacacccatggatggctccaggatatttccttttgtaaatcccagattttccaacgcctgatacatactttcaatcacgattggctgtgtgtaatgggcatttaaggtagaagctctggctgctgcatattcttccggtgtaaggactgtctttaattccagatattccgtctcccatgcggattttgtttcatcgaaagcatcagcaagacctccccagcctacatatcgggataaaatctcctgttcgtctggtgtggcattgcggttttcttcctcgcatttctttaaaagctggattgccatgatattagcacggaacttttcctttggtgttccctgtcccagttcatcatctgtgatatggaagtttgttgctggaatatcagactgttctggtgttatatcttcctttttttctgcatcttctactgcttccggttgtgtctcaacctccgacggttcctgattttcctctcgtatttcctgctgatcagagccttcctgctccacttccaaagcctgctgagctccttccagatccgcctgtctctgtgcttcctgccgttcttcatacttttccagttcttccggtgataagaaatcatcggtgcgaatcagctgacggacacgttctgcaaccttattccactttaatagaacttctacatctggactgccaatcttccctttcgcaagttttaatcctttcgcatcatgggaagcatcggattcatacgctcccggtatcccaggtgctgctccacctgtaccatactcatttttcagaaactcagctgcatcctttatatcgtgatgttccatgaaatactcatagatccgattccgtcctccggcagtgatcccgcctcttctaaggactgcatctatctcatcctgtgtgataaaggaaagggccggacgttcgaccgtaaatttctggtctacccaggaacgctccctctggagatcctgaaaacgctggaaatattccggattatgctgaatctcccacctgcgataatcttctggattctcatccatatctttctgcagccattcaaagcgatgggcaattgcatctgcttccgctgaatctgtccaagcttcccgcacgacatcctgccaatccgaatatgattgctgctcctcccggtttctgctggtatcccgaaaatggagtgcaagaagattggtcatttcttcctgctcctgttcaatggcgttattggaaatcagattatccacgtaacttctatcctcatacatatcccggattctgtccgccgcttcttcccacgtaaccatgcgatcaaagtttcttctggcggaatctccccgtcggatacggataccatcattgtcataccagatactgattttctgtccatctatggtaaatccttttccacctgtttcatattcctccttcaggaagttctgcatttcttcattatccagaccttcaatcagtcttgccgtaatatgaaacagtgtatttttctgtccacttcccgtgcggagaatatcatctactacttcatcagaaataagaaaagcggctggctgttctaatgcagctaccgctttccttatttctcctaactgttcctcttctgtcgggaacagacttaattgtaaataatctcctgaattaccagttcctctgcctgtgctttgatctggttcatgtgtctggtccatgccatcccgtctgccattttgtccggtgccgggtttttctccagaagttctgacatcaggttgtctactctctgccttgcctggctgtcgatttccatcagatgactgtccagacggttctgtaaggtcagaatgttgaatctggctactttgtggtttctcagatactctttcctcatcaatccgtacttcccgatcgttcctctcgtctcctccagactgatatccggaatctggtactctccattctggctgtaagtgatctctctcatgctctgtttcctccttattttctcctctatcttctgtgttccttgttttgcttttacgaattaacgtgttaaattcattataagctacttctttttcttttgcaaccgttttcagatctttttccaagtcattcaacacatatcgtccaatctgcatcaataccggtctgctgatctcattcacagaacttccaaggtgtccaataacctttaactggttaaaatctgtaatatgacgaaaatcctctgcatcaagatattcctgcacatccagtccgcatcggttcagtaacacataccagacactgtttgtcatcagttcccggaactccactttctgattctgttcatccagatcttccagaaaagtgccggctacatccatttgcagttcgtcgaaagcatccggcaaccaggcctgcacactttcttctgccgcctggtgaagaacctctgctaatcctccctctgttgcttccagtgccagccgctcctgcagataatctgccaccagttgttctccttctggattaagattccataactgcggatctctgcccagattttttaccttataagtatcctgcacatcaaaaacatatcggagtttcgtttttggtccggatgtgttatctatcagggcaattcctttagaaccctttttaatccatcggtacatcttctggttccagatttccatggatgccacggctgttgctcccggacgctgtgcatagatcaagagctgttccggaaaagtgtaccggtacagcctggatgcagtatttagaaaccgcatccattcctgcggattggcagcaacatcctttgccacttcctccgtcagaagttccattgcatataatttatttgccatctgttactccctttcttcttcccacttttcttctacaacatcggcaatccgttccattgcccttgtcatagaaggaaaattactactgttacttgcttttccaatctgatcaataagaaattccggcatatctgcaagtgctccggcaatcatagcctttacccggatatcctccagcataagaagctcttttacaccaaattcttcaccaaatacatcctgatatctccgtaagtcatccaaaagatattccggttttaaatctctatccatttcctttcttttatcatcaccatataaacaccagtccatattcttttctcctccatcttcataaaattagggactgctcacacagtcccctcaaaatcatcgttatttctcgttataatactgaggcaaggtctttcgccctattctttgggattgtatctgtcccttttgctttgatctccgccttggctttctccagttttccatggattccaccttttgcttctgtcctcccagttgctttttctgctgctttttctttctccagacgtgcttccctgcgttcggcattttccataactgctgtctttccatcacagaactgaaccttatccgaaagctgttcctgcctctctacctgcgtctcattgacttcctgtaccatggcatttaattccggtacttcaaacattccgttatcaggaagaatcagcacctcatgaattgaagagggaagaacaaaataatcacttcccaggcattcaccgatctgcttacgaatatcttcctgcagtaacagtgatgcaccattcattttttgtgcatttgaaagacagaacattggattttccattgcttcaacattcagtttttcattcaaaagattttctgcttcttcaccaaaaatcatggattttatcatttcattcatgtccatcaaaacaacaccacgatttctgtctgccgccactgcatctgcctggatttgttctgctgtcacaccccattcattcataagattgacagtaaccggaatactaccaattcctccctcgttttcttccacattcactgcgtaatatgctgcaaaatctccatgttcggtaacaactttatcagccaggcgttcttcattccattcccggtcacagattctcacctgtaatttgtccttcattttttcataatccaaaatatccggaagacccatattgataaatgccgctttgtcctgcacttcaatacgcatatctgccacatcacccacacaggaatccagattttttccattgacatattccatataaagagaatccagatataccatcggcacagctctttgatcaccctgtggaattgaaatgccagtcaaccttaatccattattttttgcaacttcttcaatacggatttctccattctgatatgaatccggcaaatagtcttttacattatctttgacatattcataaaattcttttctgttcatcatacgcttttacccctttctgatcatgtgatggttcattcttttcctgctgaccatctgctcggcttttttctgataagccatcattctttttaaagttctctcctggttctttcttgcttcctgtctcttttccattgttttcatcatatttttctgtccctttctgtgaatttttgtattttaaagggagccctgattcagggccccctttactgaggattactgttttctgattttctttctgctgatataaagtcctgccatgcctccggtagagataagcagaagcagaatcggcagccagatatttgtgttatctcctgtcttcggtgcatctgataccttcgtctcttcatgggactgcggcacatctggtgtgcttggtgtttccggaacttccggtttctcatttgtcagattgaaagtaacttctacaaccggcgtactgtcgtctgcgtaggcaaatgtcacttcatgcttggtctgatccagtgtgtatccatccagtgtttttgtctccaccagataatacttgattgctgtatcatatttgccgttcttgaatgcggcaatctcatacagcttactctcggcatgaccggcagcatctgtttttaaggtttccaggacctttcctttgctgtcacggaattcaaattctactcctttcagcggttccccagatgatttatctgtcttattgagaatgacttttcccttggcagtatcatctttcataaccactttctggatttctccagtatccttcacctcaaatgtcacatccgatgtcagaagatatccttttggtgcctgttcctctcgtaaggtgtatctaccaattggcagtttttcaatatagtgtgcctcctctgtggaagtccagctctctactacctgatcgtccttatcaagaatcgttagttttgcaccaggaatctctgtatctcctgtgatatctgtcttgctgatctgaaccttggtcacatcatctttcatctcatgcttctgaatctcagctgtattctcaaccgtaaaggtaatgctctctgcagtaacatatccgtctgccggttttgtttccgtcatggtatactcattacctacaacaagttctttgatcacatgagatccttctgtagaagtccattcatccacaacatttccatctgcatccgtcactttcaggtgtgcacctggaagttctttgcctgtggtcaggtctgtttttgtcagttccactgtggtcggctgattttcaaacgtaaaatcatagcttacttctgcctgatcttctccggcatattcaaaggtaaactcctgcacttcttccgttgtcacaaatccgtccggtgcactgttctcttttacataatattttccatctactggaagatctgccgcaaaagtgatctgtcctttctcatcggttgctttctgctcgatgagggaatctttctcaagcaacacatctccgtttacatttttgatatcttcactggtataaaggccgaagacgccgcctgcaagaacacggtctgtatctttttctttcttcagaacagtaacctttactttctgacgggtattctgccatttttcatcataagtgattaccggtgtgtcctgatcacggtaggaaagatcaacatatctcggttctccatccaatacatagccatgggcagttttaacttctttcacatagtatttgcctgccgggagattatccatctgtgcaataccattggaatctgtagtaatagttcctactttttcatctgctttgtaataatctttgctgacaccatctgccgctttgatatcttccgcagcaaatacatcgaaagtcacatctgtaaggcttccggttacatattcgaagagatgctccacagtgccttttacattgtccagaagtgtcactttatccaaaaattctccatttttgttgatgattaaaagtcctgtcggcacttcatctttcatctctaccttctgaatctctgcggtatcttccagtgtgaacttcacatccgttgctttcagatatccatacggtgcgatttcttcacgaagggtatattcctccccaacggtcagtcgtttaatcacatgtggctggtcttttacagaagtccactgatctacgacattcccctctctatcaagaacggtgagttttgctccatccagttccacacctgttgtcacatctgattttgtaatttcaaccgttgtcggctgattcttcttcactgttttcagttttactgtcttcacgtcctgtccctgataagaagcatccagattcagaacttcatcggaagaaacgaatcctgccggtgcctttaactcttttacataatactgtccgagtggcagatccagcgtacaggaagcaattccatctttatcagaagtcatttcctgtaacagggtatcagcgttgacaatgactttgccttctgctttgatatcatctttgttataaatgccaaagactgcaccttctaccgttgctccgttttctgcatcctgtttttctacctggattgcaactttctgtctgtcatcaccaacagtcacttcctgttcgatcacaggtgtatcctgatctgcatagacaaatgctacatccgatctgtcatggttcagaacaaatccttccggtgctgttttttctaccacatagtaagaaccaagcggcaggttatctgcaactgcttttccgtcttccccggtcgttaccgttgttaccagagcatcttttgcataaatcagctgtctgtttccattttcatctttctgataatccggtgtgtagatattttccgctgcatagacgttaaactctgcacctttcagatatttttcttcataaacaaaatcctttttgaatccactcagcatctcaccttttttatagatcgtcagctttccttttaccggatgattctcgtaatcaactgtgataatggcatcgccgctttctgaatccatctgataagcagtgtttgcatcaacagcaatctccatataattcttgttgattgtgtacccttccggtgcgttgacttcctcaatccggtaatgtccgattttcaggttctttggcatgatcagataaccctgactgtctgtaaaataggacttgtgtgtggttgtcacaggataagtagttacctgctccacgtattttttgttatccaggtcatataccttaaattctgttcctgcaatcaggacggatttctttgtttcatcgtcttttttcacaattttcaattttgccttgaactctttgtccagaagcacacgccagatctgtggctcattcggatggttctctgtgatattcacttcaaaatcatcgactggcttgtaattgtgtggtgttgttgtttcacggacaatatagcttccaaatggtaatggaatactgcaggcataacctttttcatctgtaaaaatctcagtagctccgttttctccactcactactggtttagcagaatcaaaatcatagcttccatctgctttctttgtaagggaagatttcagataaactgtaaatccggctccggataacagatctgcatcggtctttccattgttggctgctttgataatctggaacggctgcttgatcacctgttcactggaaatgcattctctttttacttctgcagtcatatcaccttcataactacattcaagatcatgttcttctgtatctgccaggtatccggtcggtggtgtgatctccttgacgtaatatttgccaagatataagccatctacagaagcctgtcctttttcatccgttgtaagagaagccacctgttcccctgctttataaatcacaccggttgctccatccggatgcacgatatcttcacgggcatataatccgtagactgcacctttcagtgttgcatcgccctgcggaacggcttttcctgtttctttatcaactttgaataaattgatttttgctgtcacacggtcattgctgaaggtatgggcgaaagatacggttgcttctttatcattggtgtaagagaacttgaacgtatacacgtcttctgtatttcttacatagccttctggtgcctggtcttcttttacggaataggaatgattgataggcagatctgctgtgaattttgcctttccatcctcaccggtagtggctttctcaatcagggtgcctttctttacaacaactacaccatctgcatttttgatatcgtctgccgcatacagggcgaaaataccaccttccagcggtttctttgtatctttatcctgttttactacagtgacttctgctttctgacgctcattgttgaaggtgacatccgcaaatacaacttctttattctgtccggcataagtcagcgtcactgtcttttcttcgccgccattatagaagttgtccggtgcttttgcttcttttaccacataagttcctagatggagattcttcagggtaacagagccattctcacctgttgtcagattttctttcaccagatcacctttgctgtacacttttgtaccatacgcagtcacaatatctgctccggcatacacgttgtaaacagcatttttttgtctgcggttctcataatggaatacggttccactctcactgacttctgctccggtaagcacctgaccttctttataaacagtaagctctgcaagctgctccttattttccacggttacagctgaggtcttacttgctaccagttttacatttgttgccgttgcatttactacatatccctgtggtgctgtgatttctttcagataaacggtatcctgtgtcttgataatcgtaacagaggattttccattcttatctgttgcaggcatctgagtgatcagctttgtacaagcctcatcgctgtaaacgccaaatactgcacctgcaagattgacattcgctgtatcgtctttctttacgatttcgatcgtagcctgttcaatccatgacacctttaagcttacatatttttcatcagcaacaccttctccaaatacaaatgccagatcctgaacacttgcattcgtagtcaatttatatgctgaataatcttttgtaatacttcccttcatttttgcagaaaaagtatcacttacatctcttgtctgtgtcagaggagctgagagataaaacgtggttcctcctccaattgttacgcttgcacctgccgcacttacggttccagtagatacattatggagctttactccttttggtaagtccattgtgattttctgctgggaagatgcgttgaacttaatgttctccgttctctgaacatttctatctacataagcttttacatccggctttgaaaatgacatcgctacatctggtatttccggcttattcacacaataattatagagttcttttgccaaagcctctcctgtagcattggttccgtaaaatgcatcactgcttccgttggcatatgatgcagccatgtgaatgatgatgaatctttttccttctgaaaaatccgtgtgtttattcgcaaaaaagctttcgctccctgcggcatctgtgccgtaataacacacttttgctaacgcctgattgtctccaatctttgtaattgtataatttccagatccaggtcctggcttagctggctgtacacaatacgcaattgctctgacgtttccgtagctgatatagtacggctctgtcagataggttccaagattataatctgcatatctatacagtggtcctttttcaattgttacctgctgtgtacttcttgctgaataagctgaaactgcttcaaatgttgcaatctctccctcttccatagcatcaagatccacaccttcgtctcctgcctgttccaaaacatcatgaagctctaaccctgattcttcatcataggtatcctgattctgtgcctgctctactaaatcatcaaattcatcagcgtcaatatcggtaatctccgagtctgcttctgaatcctccgcttcctctgtctgctgttcactgccagcggtttctgattcggtcactgcttcactccctgcagtttcagtctgagcttctgttgctttctcacgcacaatcagttttcggctgatctggtacttcggatgctcttgatttaccggttccacataatagaccgctttgtaagtgtccgcatgatctgtcgtaaaatcctcatccttgtcattctttgcttcctcaaatgtgactttgaccttgttatcatccttgatttccagtcccgtgtaatctgatttcacatcaaatacactgcctgtttcaatttcataatctttggcagtcaccacctcatcttcatccagaaggtctttcacttcctcataaagtggaggtttttcctctggctggatctccgctgcatatgccgtcatcggagacagcactgtactaagcattgtcatgcctgccagcaagccagatactacttttctaaaattaccttttttcttcatgctaaggtcctctctttcatatatttgtattaaaacagacagtccttagactgcctgcaatacactacttatcgttgtggaaaaataagattgaactgtacatttccctctccgggatcgaccatctccacagttgcttcatactgtctccctgtttttcttgataccagatccttataatggatttttcctttagacaggaacttctttgctgccaccttatccatcttttttccctggcttgcaagaaatttatcatttttccataaggtaaaagcacatttccggtcagaacagtaaaaatttacttttccttccctgacatctgctccacagcggggacatttgccaatgacttctccttttgcctttccctgaaactgatttttcttctcttctgaaatcccctgatacctggcaaccagttcctgcatcagctctgtaatcccatttaggaattcatctgctgtctctgtattctgggcaatatgattcaatgccatttcccactctgcggtcatcttcggagatttaatctcatccggtagaaccgtaatcagcacatttccatcatctgtcggcaccagatttttcttttcccttttcacaaagccagactgaatcagtttttcaatgattgctgcccttgttgcaggagtaccaagtcctttcttttctgtatcttcggtcagctcttcattccctgcacgttccatcgcagaaagcagggtatcttctgtgtactgtttcggtggctgtgtaaaatgctccgatacaaaagaatcacagggaccataatgcttgcctgcccagatatccaactccggctcttctttttctgcaatgattccaaagaactgtttcagttttttctcaattgtcttgaacccttcctgttttgttttctttgcattgagataaaacgtatgataattgcaggtaatctgacatttatgactctcataaatataaggatctgcagttgctgtcagaaccctggcactgatcaaatacaaaatcttgcggcttcgttctttcagttcaccaatatctgctttggctacttccatggttgggataatcgcatggtgatcggatactttctttgaatttaataccttactcacgtccggttgatattccagaccttcagcataaggcattttcccaaataacatctgaatcagagtttctgtactttctcccatctcatctgtcagatactggctgtctgttctcggataagtgacaagcttctgctcatacatctcctgcacagcatccaatgtctgctgtgcggtatagccaaacattctgttagcttccctctgcagggtggtcagatcataaagcttcggagggcggaccgttttctctttcacatcatccttctccacttcgcacatgcgctcctgacactctgcagccactttatctgcatcttcttttttctgaaaattctctgtgaccgcatccatatcgtcaaatttgatatgagccatataatatttctctttggtaaattccttgatcttctgatttcgatccacgatcatggcaagtgttggtgtctgtactcttccaactttcagattctggttatacagaacagaaaaaagacggctcgcattgattcccaccagccagtcagcctttgccctgcaaagagctgactgatagagactgtcataacacgaaccgtcttttaatgacgcaaatccatctttaattgcctgttcttccatggaagagatccagagtcgcttcatcggctttttacatcctgcctgctcatacaccagacggaagatcagctcaccttcacgtcctgcatcagtggcacagatcacttcatctactttggaatctctcataagtttctttaagattccaaactgctttttcgtaccttccaataccttatgtttccaacattctggcacaatcggcagatcatcatatctccattttttatatttttcatcgtattccgatgcatcacataatccaactagatgtcctacgcaccaggaaacgatataaccgtttccctccacgtagccatcttttcttgttctggctccaagcacggaagccagtgccatcgcaaccgatggcttttctgcaatcactaatttcatttactcctgctcctcttcttcatcttctagtacctcatcattgaaatcttcatctttcaaaacttctgtccctgcattttcctgttcttcctgctcatctgcatcgtctacttcccgtttttctgactctgaatcttcggattcattttcatcctcttccatctcatcttcatcatcatattcatgtttcggtttgtagactttcaagtaataaccacctgccgcagctccaacagcaaccaatccgatcagtagataagtccctgccaaacttttgtcttctggcatctgaatttcatcctctaccttatctttctcatctgtctctgtcgtttccggcttttcttcttcagcctgtttctctggttctgcataaacaatatctacttccggaagtgtcacagaatcagaaagtgtgaagttcatcaggtctttctcactgacttcggtaaggaaatacacattatcctgagattttgaattgtcgatgatcagataaaaaatcttaccactcttagttgaaatggtataaaactcttttgtgccttccgtagctgttttggtaacagaatctgctgtctcgccttctttattaagctgttcctcaatacctgtcactgtccgatcatccacagttccttttgcatctgttggctcagaagcctgtgcatcctgcggaagtggtgaagtcgttgttttctcagtcccagttgcatctgcactggtcgtggttgccatcgcaccattgctgtcacctgaagttttctgtttctctgcctgcttctttgcccattcataataaggattctgcaacacatacttttcagaagtatttccggcaccatccgttaccgtgatttcaatctgttttgttgtaaaatctttctgtgtcagttgcactctcagcattccatccttcagatctgtataagtggtgccattaactgtcacagaagtaatgccggaaacggtatcatttccctgaatcgtcagtacaccatctgtcagagatgcagaaagcgtaggcttttctgtgtcataacacttaatagagcgattctgctcatagaccttcccctcaccatctgtcacacgcacatagaccgtctgattaccagtaatggaaatacttccattccctgtcacatcctgccagcttccgtctttcccagctttcgcttcaatttttgtgatagaaaatccttctggcatatgactggcatccacagtaattgcgactgccgtttccccctgtctccagccatctggcttttcaatcgtaattgcgggtgctgtattctctgccgctaacacactctgtgtctgcaacataggcgatgtcaagcaaagaatcgttgttgccgcaagcaatccttttttcacgctatttttagatttcttctgtttcatcttctctaaattcatcatcagaccttgtttcctccttctgtatttctaccctgccgggcagttcatttttcattctctttttgaaagcttccagctctggaatgctcatatccattgcacggataatttttacaatttccagattttccgcttctgtttttgctatctccgcagccttgaaacgctttaaatctgcttcatatctggctttggatgcttccattttttccttggctttctcataatctgccgttgctttttcaagacttttcatcgcttctcctttccggacggctgttacaccgcccttttccttaccatcgtccgaatccatagaaatgactctgccagtatggagagttgatggacgtatactgcaccggatgcccacaatggatcatctgaccattgcccacatagattccgatatgcgttaccggaactcctgcatcgtaagtacctgtaaagaagatcagatctcctggctgtgcttctgactgagataccggcgtacaaatgtcatacaatccctgtgccgttaatcttcctgtattccttacacctgaatgtgtcaggcagtaacttacgaatccagaacagtcaaatccacttggcgaatatccaccccacacatacggtgtcccaagatatctcgctgcttcatttaacaaacgctgtgctgcttcactggtatattcattgccgccaaatcctgccccttctcctgtttccagataaaagatcgggtttaaccgctctccatttttcagaagttcaatgtgaagatggcttcctgtagaatttccagtatttcctacaagccctatctcatcacctttcgtgacggatgctcctgcagatacactccggctgcttaaatgtgcataccgcagttcatagcctttactgtccttgatcacaacataattgccatagctgtcgttataagcagaagttgtaaccgttccggtcagccctgccattacttttgtcccttccggtgctccgatatccataccattatgaagctgatttgctcctgatattggatgaatcctgtatccataatagctggtcacactggaataccagttaaaatcaaccggtgttgcaaacatctgcaagttgccttttgtatcgttgtaggcactgaacagttctttctggaaaaatcccaacctgtcctgacagattgacatcaggtttccactatttaaggtgacattcagcacatctacatctcttgtcctggtcacttccacttcattgcttccattatcatctgccagataacattcccatgtttgatgtccatgtgcagatgctgccgcatgactgtcataatagacatcaaactgtacaccgtatcttgcgaaagctccggtatcttctacagtatattcgacaccattcataactacctttgttcccattggtacaaacggattggaagcatctaccgctaaggtatgattggcagttggatatgctccactggcagtcggtcctccgctccaaataccacaacaaattgggcagttacaatacccactggtcacaacctgtcccaaagattctccaactcttacagttgctgtctctgtcacagtctcattgactgcttctgtttctaaccgatactgcaatgcaaaaagagcatccagttctggctttacctgttcaaaggtaaattcttcatactttgctgacagataactgatcaggataaacggatcatgctcaataggtccgatgttatatcggtattcctcatgtcccggttcttcagattccatgttgttgatccgctcctgcagattagcttccagctgtgtataatacaattccgcttcccggattgcctgatccgatgacagataactggtccctgtgtaagtgattacattttgtaaaaacactgcagaacatgacgtgacattcgttatgatcagaaacatcaatccgatcagaactgctacactgatatacaccttccgattttctttaaagaagttggtgaccttaccgccaatcttcttaatataatcaatcgtaccttttgtagctgttcctactgtctgttcacttcgcttcgctttggcataatcccatttgatctgttgcttctgaatctgttttttcagcttcttctgctcctgatgggatgcagcctgtgcctgtttctcttcctgtctttcaagtctgcttctttttctggatgcccactgtttcctgcgtctggcacttctctgttccagccggtaaacaccttcgccgctttcttctaacttatgggcaccttctaccgccgcattatcgtcttcatttttgctgatctcacggtgcaatgctacggaagttgcacttcctgctttcttgacaacagaagttttttctgttttcacagattccccttcaccaaacttcaaacgggattttttctttccaggagtttctccttcatttgcctgatagacctgtgctttcttggaatgctgctttgcttcctttttctttcttgcttcttcataagaaaactttttggctttttctttctgtttctgatggcggaaattgactccatccgtatccatctggttcaatttctccatatctttgtcatttttcacagaagcaccagtttcctcataagcaaacttcaaacgttgtttttgttttggctttttgctgccacctgtctgatttctccggctgtctcctctgttttctgatagatcagcacgtttttctttcagtctccctgactgtccggcttcggattcttctgcaagtctggattcttttccgacttcagcacggattctttttctattttgctgtttactactctgtccaaaatcctcactttgcttctctgtccgtatcagttccggtgcatctctggatttttgcacagagggtcgaatatttttcccactccgttcagactggcggggagacttatccacaaggttttcttctttttccccctgttttcttcccatctgcacatcaccgacacggttactgacacgaacagaagatttatctgtcaggttttcttccaccagaccatccttggtcatcttctggactttcttgtccctgactttcattctctgttctgccactgattactcctccttcttcggataccctttccctgcctgtaataaacagagaaaagcgatgccaaaaacagcaccgccactaaaagttaatacatatgaaattgctcgtaacattgttttctcctttgttttaacctgcttcagaagtctcctccaagcgggttgtcatgattttatagagggaattcttcgggaatctgtctacaaatgggataatgacatttccataaaacagaagtccttcaccctcattactgttggttacataggacagctgggttggtgagatattcagctgttttgccagaatctgcctgtctccggaagcctggttcagcatataaataaaatctgaattttcaaatatattctcgatttccctggaagacagcaaatccttaatattctgagtgatgccagttggaataccaccccatttacggaatcgcttccagatctccacactataagctgcagtctgttcctcttttaagagaagatggaactcatccacatagtatctggtggacttatgggcagaacggttcatcgttaccctgttccagacctgatcctggattacaagcatcccgatctttttcaactgcttaccaagctccttgatatcaaaacagacaatgcggttattgatatccacgtttgtctgatgattaaatacattcagagaacctgtaacatagatttccaacgaagtggccagtcgctgtgcttccggctcttcctgttttctcagaaggttatataaatcctccaggattggcatcttctccggcactggatcggcaagatattcctgatatactaaccgtacacagcggtcaatgatggtcttttctaccggctccagtccattctttcctccaacaatcagctcacacaaagacagaataaaatctgctttcagtgacagtggattatcttcctcggaatagttcaggttcagatccattggattgatatactggtcagatactggcgaaacccgaactacctgcccatgcagtgcctgcacaagtgccgaatattcggcttctggatcacagacaatgatatcgtcttccgtaatcaggaagcagtttgtaatttccctctttgctgagaaggacttaccggaaccaggtgtaccaagaatcagtccattcgggttcttcagacgtttccgatcaaccatgatcatgttgttggataatgcatttaatccataataaagagtttccccttcctgaaacagttcctgtgtcgtaaatggcacgaagatcgctgttgaagatgtggtaagccctctctgaatttcaattcgattgactcccagtggaatacaggacatgagtgctgcttcctgctgataatccagttgttttaaagaacagttatatttctgtgcaattccctgcacctggaaaatattattatccagcttctgacgcttctttgcggtattcattaccagaaatgtcacaaggaacattctctcatttctggactgcagatcttccaacaggttcttcgcctcttctccataggttacaaggtctgatggaagcacgtccatatcataaccggaacgtaccgcccgtttctgctcttcaatcttcatcttatccagatctgaaatcttgctcttgatcattttgattgctgaactctgatcaatggactggatatgaatgttgacattgatgctgtcatccacatccaggaagtctgcaagcatccggtctgtcagctccggtgcaagaatctgcaggtaactcacactccccatcgttcttcccatcataaatgtctgattcttggaaaagttaaagtaagtcggtgcaataaaatctttggtctttaatccggtttccggcagcatcttatactggaacttaaatggttcaatccgatcctggttgaacacatgatatagaatctccagcctttccagaccatttagtgaatgtgcctgtgctcccaggaccttaaagttgtttaagatatctgtttcgattctttcaagccttggtcttgccaccttcaggctttctgcttcgattccaaaagtgatatactttgtcttcaccagaccattatttccttttgaaagctgatttttcaacatagtacggtactcatcacgaatggcattgaagtcatcgttctgatcaggaatgtcaatgcttttctcaaattctgccacatccacctgctgattgataaaggacagctgcacactgatggaagaatcaaagtaatttaagaaatcacagtaattctcaaatatcgtggtcttatcctcatttaaagcaagctgatagttgatgtcataaaactgaatcgtcttggagaaaaagttctttgtcacctggcaaataccatcctgcagcatccgaatatacggaatactctgctgcgcagttgtaggaatatttttctgtttcctgcggtcccgttcctgcttcttcctacgcttttcctgttctctttcttttctgctttttttgtttcttctttcctgacggtttcttttttccaccagggacagacgctcctgctgagcctcctgctttgtcttttttgccatccggcacaccctccttttttacaagggtggaaatctcctgataaaaattttctgtcttatatggtcttactgacggacagataaacttctgtcgaatgatatttgccaccactttttcaaagggaagcccgtctttttcatacattgccatgaagaaaaatggaagcatgatcgttaccatcaggatggctgcgatactggaaccgattggttttctcatgaacagataaaacggaattcccactactgcggcaagtgaaaagaaaatcagctgccgttttgtcagatttaacgctacttttgttttgaccttggtaaggtcttttggtactggtacatacgccatggtatgcgctcctttcctgcccgctaatgggcattgaatattgatttgctaaggcttccggtcttgaataatgaaaatgcaagaatcacggtataagccgctactgaaaacattgctgcatgaaggtcactggatatggtcattgcatttactaaaactgcataaattcccacacagaccatcatgaagaatccctgaaatgccagtgcgaacaagccttttaaatagttgtttccgatattgccccattccttattggtcatggtggcaaacggaattggtgctatggaagtataaaggtaaatctctatcattcttccgtataaaataacggttataatgatcgacagaatccgcatggtaatactgatcagcagcgtttccatggataacaagaacaaatcccccagttccatatcttccagtgcatccacaatccttgtgattgcttccgatgcgtccactgctgtgtttccggaaattactccggcggcattgttgaccacatgctggccaacgtcaaagaccgccatcgtgatattgaacgtattcgtcaccagataaatggctacatacgccttaaagatccagaggaaaatgttgtaagtctcaaattcatggaaattgtttttctgcgttaccatcgtaatcagttcatagcacaggacaaatgtgatgatcagtcccgcaatggggacaatcaccgtttgggaaatgttctggatcagattgaagattccggcattccatccctgcggtgtctgtcccacctgcccggctatggttcccacctgctcattgacagacgtgaacatgttatccaaacaggacttgataagcccgatcaggatatcctttatcgcttccgtaattctctcaatgatggtgttcatctaccactcctcttaagagaacaatgttgccagctgtggaatcagggtagttcccagcagcatgattccggcaccagccatcagctgttttatgtcttttatgagaaaatattggctcgaaatgagccttgaaaagattaaaatagattaaattttgatagatttttcttatttatgggagccggaacctctttcgatggttccaagctccggtattgattttaaattgaaatgaatttccattgtaaccgtttcaggagtacggcggtaattttctgttccgtctttctcctgcggttctgagataatgattttactgatcagccggttcagaagattggcatccagttctttgatatccgcatactcgctgatatcgtcaatccactgttgggactgtgcgtccagtttttcttctgtgttcagcacactctcattctgggaaagttcctttttgatgtccgactgctctttctgcgtcttctccaacatcttatcaaaaacagattctgtaatcttgtcattgatgaggtcgtcatacagttttgcaatcagccggtctaacgtctccagacggtctttctgctttgataccagcttctccagactgtctctgtgtccctgcgtatcttcctcacacaactcttttaccctgtcttccagttctgttccatctccggtgactgcttttgcacattcctggattctggtaaggactgcatcatacagatcatcagcgtccactcggtgctgagtgcagtgtgctttccccttatggatataagtggaacaggtataaacttcatgttggtctttggtgtgtgtcttctttaatgttaatgcaccgccacactctgcacagcggagtaaaccggcaaacatactgtattctccctgttctgtctggcgtttcctgcctttcatcttcgcctgtaccagagcaaatacatcctgtggaatgattgcttcgtgggtatccctgactgtgatccagtcctccggagctttatctccctgattgccaatcttaaaacggtagtacctcttctgggaagccatgtcaccacagtaaacgggattcatcagcagggatttcagataggattcatcccatacatatttcccattttcagggtctttcttttcccattttgtgtaataggtacggagtccccgtttccggtgccaccatgacgggcagggaatctgctggcgttccagttctctggatatgaagttaatcccatgaccatccaccgcccactgaaagattttccggacaatcggtgctgtctcatcgtcaatcaggagatgtcccttttcctccgggtctttctgatatcccagtggtggaacaacgcctgtaaacttgcccttggttgcctgcaggtgataggacgcatggactttcttggaaatgtctctggaatacatctcattcagtacattcttaaacggagcaatctcattgtccccgtcaaaggtatccacattgtcgtataatgcgatataccttactccatgcttcggaaaaaactcttccatcagaaatcctgtctgtacatggtttcgtcccagtcggctctgatctttggtgattacaagattcaccagtcctttttcacaggctttgagaagtctctgtaagtccggtcggtctgtgttcaatcctgtataaccatcgtcttgaaacacatccaccacctgccagccctgtgactgacagtaattcaccagaatgtccctttggttggagatgctggcgctctctccggtcagttcgtcatctttggaaagtcggcaatatacgccaactctccatgttgcatttctgtctgtattgttactcatatatctgttgttcatctgatacctccgttacgttgcacatcctacgcagatttcagattactgaactcataatcattatactgcttatctttcattattgcaagtttatcttttgttttcgtgtcacgtattttctgtgcgatcacttcggcaaatacttcttttgcgtcctgatcaccgtcaaaatatactttgatattgatgattttcttcatcgctgccattgtaaaacctccattttgggtaaaaaaaagcaggtaatccatttttacagattaactgcccagactgttgattgcctttttgaattttcgtatggatacctactgttttcgttcgattgccttgcacgggcagacggcaggcggcaggtagggtatctataaagcctgccgtccactccaaaatcctgccgtcacccattctcttttatttttttaatcgaatggtattttcctgtttttcattcatctgataatccagttcttctttcattcggcttctggcttcacgcatggttctctgggagattccctgtgattttgccttttcatccaattcccgaattgtgactgcatttccgtccgcaagcagttcatagatcagtttcgttcctcgttgcagctttgtttctgtcggctttccttcctttccatccagaagatcatcggaagaaatctcataagctcccacccatcggaaaccttcttcatctccaagtttaaatgccatcgtctcacccggaggtgcaagagaacttttctcatgaatcagcactcttgttgtcgggtctttctttacttttccgatgaaaagcaggcttctcactgccgccatgatatcaatagagccaagtccccggtaagtactctgcgtacccgaagatttattcagatgtccaatcaacacaatcgcacagccggtcttttcagcaatcattcccagttttcgaaataccggacggacttcatttgcccggttcatatccacgtcggcaccgataaatgcctgtaccggatcaatgattaaaagtctgacctgattctgacggattgccttttcgatacggtcatcggataatgtcagtgcttcttctgtatcatcaatgaccataacccggctcagatcagcaccggcttctaccagtctcggcttgattgtgtctcccataccgtcttctgcagtctggtatattacattgaatggttcaatctcttccatattcgggaaagtcttccggttcgtacaggctgcggtcagcatcatggcaaaataagtttttccctctcccggattgccctggatcattgtcagctttccaaatggcagatagggaaaccacagccattctacactggtctgctcaatatcttcatagcacagcatcggcactagttcttccggtgctttcattgtaactgtttcaatgattgctttcttcctgtccgcacttttatcgcaaaggatttcattccagtcctttcgggacggtttcagacggatgacactgtatccgtccgggatttcttctgccagtttctcacaggcttcattccctggctggtcattatccaggcacaaaaatacagaagtaatctgagggcgttcagaaagaaaagccatcagtgccacaccggagatgccacccagactcaggtagcttcgtttcttccagtctttgggaaacaactggataaaagaaagcagatcaatggctgcctcaaacacaaacaactgattatccgtccctctgtgactgaatccgcaagatttatcagatccagccacatctccccggtattttatttcacctgtccccctgcaatgggcatatcttggaataccatctgcatcttttccaacaaacaccacattatggtgcttcttttcttcataaatatccccactgctgatccatttctccaccagatttttttcaatccctctgttttctgtcagatatctgatgattctatcattattttcctctttctctggcaaccggaagtcaggggacggggcggggcaggcactgttcctgccttcgccttcctccccggtcagcatcttgacagcttccggaaacgtagcattgtaaaattccatcacaaaatccaccggatagccacccctcccctgactgtgcctgtaccacctatttccagacactgttacactgtcatgctttttccaacggtattcctttccgcttttcatcagttgttctccctgtgcgttcagaaaagatacaagatctgtctggtttgctcttataatctgttcttccgtatactgcattttcctcatcctttcctgtctgtcctgctgacagactgttataaactcatctcatagttccgttttttcttcactgcctgttgttttgcatcacgctctgcacattctttcttcttttcatccagttttctcaagagggaagtcttcttttctggtttctgctcctccattttttcttctgaacgcccggaagtatctgcttctgccatttcccggtcacgtctggcaatgtctgcacagctctgtaccttttttacaaacgcaagttcctcctgatacggctgattgtctgctttcagctcttcgatcaccgactggagttcttctttctcccgtttccatctggcagttgggactttcccattttgatccagatgctgttttagttcccgttcacatttacggtaataattgatttcttttttgtgctgctgataatatttctcccgttttttctggaaaaaaaaatgattgtactcatcaatcaatggctggttcgtcttgattacctctgccattttttccagattctccagttcctttaactgtttccgcttttcggaaatttcttttttactgacagaaacaacaccgttcaattcctcaatccgttcctgcaagtcctccatcgtctctatctgatgtgtctgaagataattgatggattttgaaaattcctgtagatttgagagattcttacctcttcgtttcatctccgcatagaaattaggaagtggcggtcttccctgtgtctttttatcataatagtcctgcaggctttccaggagtgtcgggttctgcctgcgatccagctcggctttcatttcttcataaacagtcttcatccactgaatggattctttcagggaaatgaacatctggttgaactgccggattgcccggttcaattctccgatcaccgttttgattccctttttctccattgcccggacttcatatccctcgtggatagtcgggatcaggtcaatcccctgttctttgtaggaacggtggtcgattctggctgccatgtggcactctcgaaattttccatttactttctctgtccatgctctccgccactcctttaaaagctccggatcattccaaccggtagtggaaacagcattgaacatctcctttcctttagcatccttcacccggtttccatcctcatcaagaatatattcccgcctctgcttattgccccagattccttcctctgtaaaaggacggattggtacaagcacatggaaatgtggattatccggttcttcttcattgtccgattttccctcatggattgccagatctacgatcatgccacgtgccacaaactgctcctggcagaactctttcgccaatctgatattttcctcaagtgtcagttcattctgcagggcaatgtcaaacgaataggcaagctgcgccttgttgttcctttccacatgctccacctcgttccagagggtttccctgtcagtcagacgctccggcacatactccggtgtcaggatttctgtaaataccacacccgacttgcttgtataatcgtgtatcttgttgtaataactgtcaaaaatcctctgcccggaaatataggctgcggaagcgatcaccatctgtcctttccctctggatacatgtcttactgaaaaatgatacagtgccattagctgtcatctcccttctctgtttttttaactgcttcggcaatctcttgtctgtctttttgtgaagcagctatataattctgccgcacaacactcttgttgtaactgctgttacgcatctggttcattacctcctgaaattcttcctgttccagatctcttgacaatggaaacgctttctcaaactctgcccctttgacaatcagccggtgggaacgttctctgcgttccaccagctttttcctctgttccagaagatttttattgtggattgccgcctccagttcctgtctgctcttttccatatttgccttcaattcttccagcgacatggattcgtatttcggattttttgctctgctcactctgtcgtcctccttcttttctgtaaataaaaagaaccggttcattcataaatgccgattcctgggtataaaaaaactgaggtcattgttccataattaggaaatgctgacctcagtaacttttgaaatatttagttgtcacaacgatataatagcggaagttttcaacacaatccgaatatgcattcatctcaaatctgatatccggatttctttaactcttccctatacaattcagcaatatatgctggaccattgcaccacagctttgtgttctcatcatacagtgcttttcctgtctttgaacaaagaaaatctgtcaatatctcttttctgtccttgcccgtttcttctgcaatctcatctgtcaccatagtgataagaaggtcgattgtataattcattttttcctttggaattgttacttcagccatatcttctcacctttcataaatttcaggcactcaatagctgcttccgttttgaagcaatattgatcttttagtttattgggcaacaactgtctgatgcagaaatcgtctgcctccttatcgcctgctgtcccgaaagccccggcaaggtaagcagtaagggtagcgtttgttgcatcatccgcaatctttcctgcaatgatatcataccttgccatttcacgttccacttcgataaacatttttttctttcgatgagcggcaatgcaatgtaaccagtctacatctgcattttcaaaaatatgcatttcaagatttcctgaaaggttgaattcaaaagttgaaatatatccaaacttctgtccttcttcaattgttccggttgcgattgctttggctattgaggttctcagaaaactttctgcctgctccttggatgtagttaaataaaatccctgcccaaaatcttttctctttgcacatttggcaagatctggctcttttacctcacaataacttccatgatagagaacaaatccatcttttaactcaagcactaatctttatcccctttccttccagaaattctgtaatgtcttcaagcacagcttcatcaccctcacaatgaaaaatcccatagcatttttctatatatccaagaacatcggcttctttaaacaagtggataatctgttcaacaggtaaatgccactcttctgaagcaagccgaattaatcttgtctgcatgaaagtaatctctgttttctcactcattatgaatcctcctcaatttcttggtcaataaaattagaatttatctgttattaaacatctgcaacaaattcttctattaaactgtttatcaattccggtttgtctgtattagaattatgtccagctccttcgatccacttcaaaggaatttttctcttttggtgccatgctttgttataccgtatacatgaaccagcgtggtcttgcgttccgcatattaacagagatggacacttcagctcatatggcagattcttttccattgcatctgccaaaatgcgaaagccatgccccgcaatttgcgcataacgcttttgatcaccatcatagaccaacatcatttcacgcattagatttctgccataatcagacatggcaactccttccgttcccgatttcagaagcaatttccacggataatgagcatatacgggttccattcgcttcaaaagccagagttcaaccgcagtcacatagttccgttgcagcggtgcagagtcaatagagataaaacctgttaatcgatttgggtaaagctgtgcataagcctgtcccacatatccacccatagactgaccaataatgaccggcttggtaattttttcttgattcaaaatgttgttcagccattttgccttatcgaacaagtcgaactcaaaccgaaacggccatgaagaggcgtgtgccggtgcatcccataccacaacattatacttctccttgaaatgttgaatctgcttatcaaacaatctatgatcggcagtcaatccaggcagaaaaacaagagtaatttcatctgggtgtgagacgcttacccaatagtggattgttccgcaaggagtctgatatgttttttctttcattgattttccctccacaacttccgatttcacgctttctttcccctatatgtttgtatctgaggtattcagtcacaaacttcggggataggcacctgtgccgcaaggggaaacatccccttgtccgaaatctctgatttcgctgtatttcacggattaagattcctcgaatccgtgaatagcaccgcaggtcgcacgatacaggcagatggaattgcctgtatagaagtgcgctcttagctttgctaagagaattatatttctgtttcaccgcatattttattaagtgccacaagagagaaagtatcctttatcaaatgttttatttctcttgcatttgactgagtaactgcacctttctttattttgtcaaataactctctgtcttcaatatcataatcttccctcagtctttctatttctctctctgcaattttttcttttgccatacctgacaaatcattaaatttaataattgaatcaaaacggttatatatcggcaatcctaaatgttcttttatctcatcaattgttttataatttgaagtacacataataattgccttatttactaccactttataattatgatcttcataaattccttcatcaaataattgataaaatgcactatggaatatagataaagctttatcaaactcatcaaacaacaatacattagtttctctagccaaaagatcttgcgcaaagcttttttcgttatatcttccaccaaaaatataattggccgactcattattctgatacatagaaaattgttttcttaataattttccacccatcaattctgccatatattgtgcggattctgtctttccaagtcctgaatctccatataacaatattacaaccggcttgctttgtttaccatctaccagaggatatattgcttgaagcaatttcttttttgctctttcctgtccaattatcctttcactatattggctattaaatgtttgtatcatttcttttgaaacttccaaatatggctgttgcgtttcatgaataatacttttattaaatgttcggtatatctgttctcgaatacttttcggtggattttgaatgtacatatttgttatggacatttggaaaataaaatttataaagtttataattacatgttcctgaacactacagtactcatctgcatgaataacaaaatcctgaactctcggtttcttctttttcttaggctttggttctggctgccctggaatgttaacaaacacatccatttttttattaccatcatcaagtttcgctgccatttcactaagatttcttgcacttttcggaacaatcttttcaaaggcagaatcagatcctacaaaaatttcaatcttcttcacgtactacacctgccaatactatatcataaacatctaattctttttcttcttcagcagcagacttttctccctctacaatttcttctgctgtagtcttgtcttctgctggttgaaaatcaaactctttatcaatcgataaatgattttctccacaagttccaacctttattccgaaatatgtcagcttcattttgcttaaatcgacaagattataattgtttttaaatgcttgaaggttaaatctcaatacgcttttccgctctatctctgtttttaaaagcatgtcataataaccccgttcacctaatattgcctcatttaatttttccatatctattggcatttcttctttaggcacaattgtcaaatatgaactgagcattttatataatgtcacagaattttctggtgcataaacaccactattctcgaatttttttacgtgttcatctttcgatgctgcctgtatataatctgtaagcaacgtattttttattgttttgtcaaaagcactggtcagttcagcggaagcactggcatcaacttttccctgaaatgttgctttaatataattcaaaatattaaagccactttttgcctgagcttcaatttcagcaactattttagctattttttctttattttcctgtgttgaccaatcaagtcgtcctccatttgtaacatcaacataatcctgtgcagcagcttcatcaaaatatactatttttagaaactctattttctcagtgtttttatttttcaacttttctgctccttactatttctgttcctcacacaatttctgatatcttttcataagttctgcaacacatgcagcttcgcttttataggcttcactgccttttgtaaatccgtatgcctgcatgactgccatatcattttgctgatgtgcctttctcagttctggaggcatcgttaattcatcatacagcgttgcaagactgctatttggatacaatgctcttgcatcaagtattgcttgagcagtcttctctattttttccttttgctgctctgttggctctggccaagggaaattattgtatacaacatcttttgaataactatagtcactttttaatcgcatacatgttactcgcatccaagccatgtgaatatttgaaattataattccaaagtcatacagtgaagcatcagggattacctgaaccctatcggttacaattgttccagctttaatgaatcccataggaacataacgtcttgcttgtgaagatactctcggcacaatgataaaatctttatcaactggctgcgttctctgtgcaaaaagtgttggtgtagctgcaaattttcttattccagccgcaacgctattttctctcgcctctttacatttctttattctttccataatcattggacactttttcaagtcttctggatctgctccaacaagccataaacaccatcttttattccctttgatatattctgatgctcccaaaagaggatggatatatttctttgcattcggatcttttttaataaattcatttaagtcctcatcttcaataatcaaatttcctccatctgctggtttattaccatatatcattttaggaatatcacacaagggtttattccggctacgtactaatatattatctccatccatcagataacgattgatattttcagccactgtagttcttccattatcgtacaaatatttattcgaacgtgagaatttcgcaaatccaatgatcacacaatgtacatgagcttttacactggcttcactatcccatacaaacgttctatatgcaaagttaataatatcatcctgcataaagtcccaaaatctggataccgtttcaccttgaacaattgaatttgttgatacaaaagcaacttctatttttgttccccgaatataatctgacgcttttttataccaggcacaaacaaaatcaagattctttacccctggaaaaatattttgcatatcttgtttctgctcagctgtcataaaagtaaatccatgaaatggtggattccccataatatacgacacctgatttttgggtacaacactctcccaatcaatctgtaaagaattgccttccacaataaacgcattagttgtcaatggcagaaaatctaaattcatgtgaacgatgtcttctgtctctttcatcatctgagattctgcaatccacaaagctgtctttgcaactgtgacagcaaaatcattgatttcgattccataaaactgatcaatggaaacatgaatcggggaagattcatcaaagccaaaagtaatctgtcctctttgcaattcttttatgacttcattctccaatcgacggatactaatatatgtctctgtaaggaaatttccactaccagatgccggatcaagccaccggagatttgacagcttcgtttggaagtctctcaactttttatcttttgttctctgaacggttatttgctgaatttctttcagctcatttttcaaatcgtccaagaacagcggatcaatgactttatgaatattttcaatgctggtgtagtgcataccgccggagcgtcttgtttcaggattcagtgtactctcaaataccgcaccaaatatagtcggactgatttctgaccagtcaaaatctgctgaggctttttccagtaaaagatttctgatttcatccgtaaactgtggaatttcaatatcctcatttgcaaacagcccaccatttacatatgggaactgtgccagagattcttctatgtatggatctctgtcttctggttttgtatcaagcacctggaacagctcaatcacagcttttctcatatgccttgtatcaaattcttccagataatcatggaacatgccatgctgtccaaaaatgccggcatcctctgcatacaggcaaaaaaccattctgacacataggatattcaggcttttcattgcacgctctgttgtcggatcaacatattgttttgccagtgcatcatacagcaaccctacaatttcacctgcggcaatggaaacttccatttctctctgaagatttgtgtttccctcgtccacaagaaactgtaaccgatagtattctttttcaaggtcttccaactgaatgatctccggatcaccgcccggcttttccatatcataaatatagaatgactggaaattactggttacaatccatcttggtctttttgaatatggcagctcagaagaatatctttttgcctgttcaaatggtgtcagcatagaaccgtcagactgccggatagcagccgtcaggctcttgttgatacttttctgttcaatcatgacatgggttttctcaatatacccgtcaataaaactggtgtggtcaagatgtacctgatcctcaaaagaaataaactgtgatatttccgttacaccaaataccgttgtcagaagctccacccagaaaatctggctgtcgcctttttcatatccacggtctttccagtttttcgcaaacgctttcgccgctgctctttgctgtgtatctgtcattgcagcaacctcctgttattcatcatcagtaaattccatcatttcatcaacggtgcagtctagcttcttgcagattttctcaatcgtctccattgatacatactggttttttcccatccgggcaagaatgtttccacttatcccggtgaggtactgcatctctatccgcttcatatttttatctatgagcattttccataatctgttataacttacgcccataagctacctccatatttctcattcaaacatattttatattatatcacgatttcgttaggttgaatacctgtaatttttgatatcttcagtaaaatggaaaagaggatgccccggcaaagggcaacctctccaatcatttactctgaattagtcaaatggaatctcaccatctggtgcttccatgaatccgtccttatctgtttttgatgtttccgacgaatccgctccgataccgttatccttgttctgggcaaattcatgttcttccacaatcacatctgtggtataaattgtcttcccgtctttatccttataattaccggtgctgatacgaccaccaattacaatcctcattcccttatgaagatatttctgtgcaaactctgcactctttccaaatgtgacacaagaaataaaatccgcttcctgttcaccgtcacgtttatatcttctgtttaccgccagtgtgtatctcgccactgccatgtcattgtctttcccggcatatttaatctccgggttcttagtcagtcttcccattaaaattactttattcataatcgttaccgtcctttccgcagctacgctgccattgcatattcatcatcagttttattatccggcataaacattgcacatgcttccggtggattggtatcgtccggtgaaaacattttccggatcatttcatacatgatcggataccgatatgcgatttcttctcttgcaagaaatctgcatactctgtaaagattctttttcatttcttcatccgtagcaagcatggcagccagatggattctctcccttgtataaatcagatttgggcatccaaaccagttgatcagctgcatttcttttattttcagttctgtcataaactgctcctttccgggcattttgccctgtaaacattgtcatcagtttcattcgtctggtggtctggcgtgcgtttccctgtcacctgcagccgtctcagactgcctctgcctgcataagcaggtcactgaccataaggctccggtcagccgcccatcatcgggagtgtcattatgcttccgcttgctctcagaaaaagaaaggtcatggcagaactcctgttaggcttccagggtgcacttatcggttgtcaaggttcagcgaaggaacattccaaaacgtcctctgattactaaagtcaaatgacttgtcagaatgcaaaaaattcgtgatatttttttgcatttttatcagtttttcttttattttcattagtcccttcacatactctgtactgggacaagcaaaagcggacatgattttggagatttttgaaaaataattattcctctacctataaagcgttggaaatggtatttaccaacccccttttgcaagtttttttcgcataaatgaaatattccctcactaatagcaagtttcagagggcgtttggacggtactttcgcagaaaaatttattttttctactaatcacacgtggggacttgaagaatgtcagattatttttcaaaaaatcaaaaaagaagcaccgaccattacagtcagtgcttgtaagatgactattcaaatgttactgtccttttcacacacaagtctttcatagtccagaaatccacggatatacatttcttttgccacatgtccttccatggcattcttcgctgagataattctgtccaatgcctgccacatctcctgtccggcatctctgaggactggttccagtatttctatgtaataatgaatttctgcttccagagaaaacatctccggatcagattcaagaaatcgttccagttcccgttggtattcttcataatagctttcaatcaattctcttctcatatctggaatcccccttatacataaatcagttcctgcttgatgatttcagcagcccgattgcggatattgttgcagtggcgtacccattccataggattctgtctcttcagttcctcggtaactccctctgaacttctcatttgcgcttcgatcagctcaaagcgttcctgtgcctgttcattcagatctgccagatagctgtccagtctggtagtcagaagaagatatgtataagttccagatttatgttctttcagatattccttccgaagcattccccagaagccaatcggtctggtttcctccgggtagtaaagattcggtaaataatagtctctaacttttgtgtattcgattttcatggtgtctcctttcgctttgcatgaaattgtcatgttatctgcgtaggatgtgcgtttttcctttaaaatcttttcacatagaagacattaagtgtttgatgccctggctcttagcaccgggattgtcgtttccatatccttccagaaggtttacgacaccccacacgccaagacctgcgccgattgcgactacaagagtttttaaagttgtaattgcactgctaaaaaatgccatatacattcaccaaaactgacttctttcaggtgtttacgggaacgaaaatacaccgactaaaaagccggtgcacctagtgtcagttattcctttcctcattattttctgttcattcccaaggttactccgacagttctacatgaattacttccacctcttcttcagatttcggtgtatactgcggatttaactctttctcaactttgtaccggttcttctcgttttcatctgcaagaagccgatagtttttgtgtttcgtgatatcatatttgtccgagaaaaatggtctggcaccacggatctgcaggatacattttcctccatccatgactgcaatctcatcttcagtcatcagctgtttacctgttttctggtaattcaatccaaaagacttctgattactcctcgtctccgaagtgttatacaggtcaatggtttccttacccagaagctcgctcatttcctttaaggtagttttctcttttcctccaagaaatagtgtggtatcacagttacccagaatagtatctgcactatccttatacattgcctttagctgactctgtgactgcaaaataatagaagcagagatttccctgcttcggatggttgcaatcagcttgtcaaactgaggaatttgtccaatattggcaaactcatcagcaatgacacgcacatgaactggcagtcttccaccatattcatcatctgctttgtcacaaagcagattgaaaagctgtgactgtaacatggcaatcacaaagttaaaggttgtatctgtatcggacataatcaaaaacaaggctgtcttcctgtccccaatcttatccagttccatttcatcataagacatgatctcacgaagttctgctatatcaaatggtgccagcctcgcaccacaggaaataagaatacttttggctgttttgccagccgccattttgtattttttatactgtctgaccgcaaagtgctgcggatctctttcttccagttcctggaacatcatatccactggattctggtaagtttcatcctcttcacgggtttcgctttcattcaaaagatccagaagggtattcagattcttttcctcttcatctccttcataccagataaaagcaatcaatgccgtgtacaacagcttctctgctttcacccaaaaatcttcggaagctttttccccttcgcctttggtattaacaataattgttgtaaccagcttcaggatatctttttcagaccgtatataagcaaatggattgtaatgaagcgatttggaaaagttgatagtattcagaaccttaatcacatatggttcgtgtaccacttttcctgatttatctttcataatatttccattcttatctttcttaggtggtccctttgctaacatcttcccgcactcctcgatcagagtgcctttcggatctgaaatgaccatggaacagttcatctgcatgactgacggcttaacgaaaaatcgagtttttccggaaccactgccgccaatgaccactatatttttatttcttgcatactttggctgtttaggtctactttccatagtcaatgcttctgttgctgttaatggaatattcatccagggatcttccgacatataaggtttaatatcctcagcgtttccccatctggctgaaccatactcgattcctttccggagtttctttgcatctgactgtttctgccataccagtaatttcagaatgacagctgctacaattcctgtcagcatatcacgccagttaaaacttggctgcaatccagtaagaatcctgtctgcatgttccatcgcatataatagcttgttcccaatatcttctcccagactgtttctgtaaagaaatgatgcccgatttgtataaaaagcagttaagatatatgggatattggtaagaaccagtttctttttatccagggcggacagcctgaccctgatcttattcttccatttttgcatcagatttttaccgatttgctttttcatcggctctgctcctgatgccggttctttactttgtccttcgatttctttggcatcattgctctgtaagttgcaagacgcttgtgaatagaaggcttattcgctttttgaatctgtttctgggaaaactcacggaaagcagcattgagggcatcctgatcacgtcctttaaaaaacaccagatacatcggtggatctttactcttatcttttttcaaagcataattgatcccgtattttctggcataacgttcaaaggacttgatattcttatttgtgatctcgatattgaccatcccggcattttgttttgccagctcttttaccgtgacctttccctgtttcggctgattcttcttcgctttcttctctaccgatttctgcttctgatgacgcagataagcagcaagaacctttttcaataaatctgctgttactttggtagtccgaatgcagaacgtgaccgttttctgagttacctcttcctgcatgattttccctcctttcagcgatttaactgctgtccagatctgtaatcatggcaaccacctccttcattctttactcttcctccgcacacaacgctttaaaaaattcttttccttttggtgtaaccaatgtctgtgaaccaagatgtccattgttaaaatagtcttttacaataaacagatcattgttcttctccaccgcatagggtaacagcgtgccggatggactcctatatagaaatcctctatttaaaagaagtttcacaaattttctttctggaaattcaatctcttttgccgtcgttcgaatattggtgcattctcctgtaatcatgaaatgatcataataatctgcttttggctgcatatcctttacacgattttgcaattctcgatttcgattgttttctgccaaaagtctctcggcaaattccaaaagaagttccgggttatcttttaccctgtctaaaagatcggtctctaaatatccgcctgttttcctaatagccggaagtacctcatcaaatacccacttctcaaaattctgtgctgactttaaacgactttttgtaatcagccgatatacatctccctctggaataaaaatcattggctgtaccccacctgatgtaaggacgccccgtttcagggcccccttgcaatgaacatttatcgcatttcttggttttgcatatcccaaagcaaatgctacatcaattccagaaaataaaagtctgcctccatcttcaatcatacggatggaaccaaactccgaattgtgaaactctgtgattttataatccgtcttctccatcctcttctccatcctcttctcctcctgaaccggcaagtaacatcaaaccattttcaatgattgtgctcctaataaactctgctacattcacggttaaataaccaagatattctgcaaggaaactactatattcctcttctgtcaacaattcctccagtgcttccaaatgagctgtcactttagaagtctgctttccgccaagcagcttgcctaatatttctgtaaattcctctgtgtcacatgactcaaacatacataagatcatctccattgttgtttccaaaaccaaacgatccattttcatttgcgtcagctcttccattgttttcatggcagtcataagcgcatcacttgtcatatgttctgtattgattcttccttctgaatcaaccaatcctattgcaaataattctaaaaagtattttctcataaatcttgtcctcctatcgaaatggcatttcttgttcaagttcttctggtatatcgaatggaatcttcctcttctctgctggttgaaatccgtcagattcttctttttttgttttggcttctgcaaactctacattatccataatgacttcggtataataggatgcagttccagtctgttcatctttgatctgagagattaccaactctccggaaagagcaatcttaattcctttttcaagatatttctccacaaattctgcattatttccataagctgtgatcatcactacaaatgctttgcttgtgcgatttctttttactaccagtggaaacctagatactttggtttgtcccttttgcgtagatgtcagcttagtttctggatctctggcaagtctacccattaaaacaatcgtattcattctttttgtcctccctttcttcctgcaacacccttccctggtatttcaaacaggataataatctgtgcattttctgcacgaaaaaatgaggaatggattcgaaccattccccacttgctacaggatttctcctgtaatataaataagaaaatctaagtattcacatttgggctttgtctgtacatatacatctgatcgttatcattccagataacccggctgtaaaaatacagtcacagtctctgtttcagcagaggtcctgtacccttcggtggtatcattattgcttcgctcttcccgtaggagtcttcgcctgcacgagccggattatctccggtaagcatgttcctcaagatgtatcagctccttcaattgtcaaggtgcaatcggaagaactgtctgaacctcttttacgtttgtgatttttggaaatcagaggattttcaatttgccttccatatactctgtattgggagcgacaaaatcggacatgattttagaaattttttgaaattattttttgaagtgtaaaaagatataaaaaaaagatgccaggatttctcctgacaccatagtgactatgccaacttcgtgcccactgggcacaaggttgattgtattattcttcatttcctaatgatattggttctttctttgttttcttgtttttagatatcatcttatgacctgtgtaaatagccataatcatacaaagcaaagaacttgccgcaaaatatttatggcttgattttgaacctttatatccgctataaaaagttcctagcatcgttatcaatgctccgacagaccaatattcatgagctttcattctaacatctccctttgtgttaattttaatatgtaccgtttgatgaaatatgcaaacaggaatttggaacgtgctttataaattttttccgatcccctcaagttcgttcatggaatccttgtttttttcaagttcatctctggctgttgcataatatgattttttgaaaagcatatcccatgaaagatattttgccatacagtcaaactgcttatcaatcagctcatactggatactgtctacgggagaaccgcctacaacaatcgtgccaacttttttattttttaactgcaatccacggcagtagcacttatcaatgataagtttcaattgtgctgacattccccaccaataaactggtgtagcaaaaagaatcatatctgcggcagcaattttatcaattgtaggatttgtatcatccttatcgacgcatcccttagagcattgacagacaccacatcccttgcatggtgcaatgttgagtttgtcaggttcaatgatttcaatttcattcttttctgatgctccttttataaatgcattgattgctgtcagcgtgtttccttttctggcacttccattaatgattacaattttcatgcgtgtatcctccaacttccgatttcatgatatcatttctaatacagattttaccgtatttttcagattcagtccatcttttaatcccagtcgatagaaaaattcttctgtttctgctccactgctaaaaattgcattacagtattccgtaatcacttcttcctgttcttgggataacgtttccagtaatttctggtatttcttatcaatctcacttactggctctttatcctgctttaacttccattctgaatatgctttccccatatgctctgtaattgtcagattcacaaattcctgcacttcctcggatatggtgctcgcagattcctgtttatctttctttttatcatttgatttttcaagtgtcgtgtcatcaatataacgaatgatttctcgaatatttgacttcatcgactgcagatatcctttcatcagcacagctacttttctagcatccgatttttcggtttctttttccagcatataaaactcttccagttctttcagaatatccatccctgctttcatctgaaattccacctcaagcaaatcatccatcactttatataattcttccattgtttatttctgcctttccatatagcgccactatattttccacaatcatccaaaaataaattcctgtaatccacatttcacaacttcaattactgcaactatccccataccgatatgtgggagtagaacaaacactactgtcgtaataatcgctgatttcattgtccagtccgtactgattccaaacccaatactcaaaacttctgtcacaacagagattccggctatcagatagcagaatccagcagataacccaaccaggaacaccagcacaatattcaccgctgcaagtaccagccaaacaggagctgcaataattcgaaatggcagttttatcataaatctcaacataattcttcctcctactttgtgcccagtggacacaaggttattttagcatatctgccagatatgactatctctttttaaacttcgtgcccagtgggcacaaagttcttacctgtctggaatatccttcccccagtacatgtcatgtcgaacttcagcatcataaaactgattgattgttgcaggagcgttatacaataccgtcagcatatactgccggatattcttcactttgcttgtactcctgtcaagactgaaaaacacatactggatggaatgttgctcttatactcatgacacatccctcccttcgtacttatcaatgattctgattgctccattcctccaaaagctgacatataacagtccgtatcttctgttcatcatactctggaggaaaatacttcttaatttcatcctgttttaatgttaccgttgttttctttttacgctctcctataaccaggagccgcacaatctcttttgtcagcgttttttcttctcgatgttgccttattttttttgcctgttccagacttggatattttccggtactctcatgcacttcctccaccatctcctgttctggaaccgtaaggtaggaaagctctacacctacctgcaatccgatcacatcacgatctactgcgtttaataggtcattcatcagataagtaagccggatatagcgatacacctgccttgcactgtcatttgcgttctttccaatgtctttcgcactgataccgcctgatgttccctgatgattcattgcttccatcttcatacggtaagcaaatgccttttcacttgggagtatattaggtctctgcagattgctgtctaccatcgcacggacagctgtatcttgatccatatttctgataataaccggaacctctttaagaccagcaagttgtgccgcatgtctccttctgtgaccggcgatgatttcatattcaccatcacccagcggtcgtaccagtaatgctgtaagaattccctcttctttcacactttccaccagttccgccattgcctcatcatcatttacttgaaatggatggttctcgaaagaatgtaaatgctcaagtgaaacctgctggatatcgttcgtttcttctcctcctccaagtaattcatcataagatgtcagttttatcttcgatgcacttctacctttcatccaaaagcacctcctgtgtcatctgccaatatgcagccgctacttttccttttggatcatgctcaaatatgctgattccttccgcactgatttcagctgctcgtactgaaaatggaatactctgtggaaaaatcttaatctggtttccatatgtatcaaaaatcagatcagatatatctcttgcatagttcgttcggttatccaccattgtgatcaatatacctccaattttcagttgtttgttaagctgtcttcgcacctttcctatcgtccgtatcagctgttctagaccctttacaggaagataagccgcctggacaggtataataactgcatcgacactggcaagtgcattgatcgtcagcattccaagtgatggcatacagtcaatcaatatatagtcgtattcttctctcattctttctatatattgttttaagacaagttccctgctcataatatttacaagtgaaacttccattccagagagttcgatgtttgccggaatcaaatcaattccttcctggtgatgtaaaattcccagtgtattttcaaatagttcatcttctacaatctttgtcagaatagtagccagtgtgattggtaattcatctgggttatgatacccaagacttgctgtcatacttccctgcggatcattgtcaatcacaagcactttcttccctgcttttgcaagtccgactgccagattcacgcaacttgttgtcttgccaaccccgcctttttgtgaacacaatgccagcactttacaatccttcattactttctcttccatcctttttatcctcccataaataacttgaacctttcagcatccataatgctgcttccaaaaatgcaagataccgttctgtcatactatcaagaaccggttctgaaataactggtttttcagacttcaaatcttttgccacatcctccaaaaccaaactcatttccttcatttctgaccggataatctcaattgtttctttctttccaacaacacatacatgattgtaaatgcatgatcggacgatataatcctgttttttcattccgctcactttcactcgttcttcaattgttgctttttcataagaattcacccgaaaagaaatggtcgttgtgttgtgttttccatgtctgtcaccagccatcgcttattcctcctcttcctcatgtttcttatctagcaaacctgctaatttactctgtgtagacggatacagatgtgaataagtgttcaacgtggtttccaccttttcatgtccaaggcgttctgcaatctccaatggagccacccccatatcaaccagcatactggcatgggaatggcggagatcatgaagtcgtatccgctttacaccagaccgctcgattccggtagccatacaatgttccatatgcgatttggtaaaccgaaaaagtctttcctttttcataattccatacaaatgactgcaatactccctaaattcctctgcaagaaaatccggcatcgtaatcacacggatactctttggagttttcggctgcgtgatcatatcctttcctttcagtctctgataagatttattgattgatatggttttctcttcaagattgatgtcattataagtaagtgcaagcaattcaccgatacgcattccggtccagtacaacaaaagaaacgccattcttgtctccggcttatcacttactgtttccagaaaagcattgaactcttcctgcatccagaagtccttcggttctcctttactcttgccaatcgctcctgccttcctgcagggattatcctgcaggttataataccgcattgcataattgaagattgcagtcagctggcagttcactgttttcagataagtaggagaatatccttttccattcttatccttatacgtcagcaactcattctgccatgcacggacgtctgccaccgtaatttcactgagaatcttcttttcaaaataaggcttgattttcaggtcaataatatatcgcttcgtgtacatagtgttttctctgagacggacatccatatctttgtaataaatctccagaaaatttccaaattcaatatccacaccctggctctgctgttgcaggaaatctctttcccattccttagcttcacccttggtcctgaatcctcttttctgttttcttttccgatttccctgccagtctttgtaatagacctgtactttccagttttttccttctttgtaaacccccattgctaatcctcgactttcatgccataaatcttttctgccaggaatttcgtagagatttttccagctactacaatatagccttttgccttcaattctttgttgtattctcgcatcagactatatgcataagtttttgaaactccaagaattgcacacacatcatccacatccatatacattttttcctgcatcatactcataccgctttatcctccttcaaatactgctcaacatgttccagaccatagatcttgtcctctacatagcgggttggcacccgaccgagaatcacataatagttcttgcttgccagatcggcattcattctttccactacccggtaagcaaacgaaactgataatccaaagagttctgcaatgtcttccactgataaatacatttttctcttacgcatgaaaccattcctttccctcttcctgtggaatctcacaagtatcttctactccgtagaaacgcttcacaaaatactttgtcggaacttttcctctaagcgtcaggtagccctgttcttccagttccttgttcagatttccgatgatttcataagccgatgtctgttttacttccagaagttcacatatatcggctgcctttaaaaataatttattctgcataatcagtacctcctgtgttttgaatatttatctcttcatatactctgtactggcagatgcaaaatcggacatcattttccgaaatttatcaaattttcttgttttttaattctccatcagtgtgattactgtgtcatggagtttaagctcatcgaaagtaaagaacctttctgtggtatctgttttctaaatgcaggcaacaaaaaaacagtctgccttgacgaaaatcacttcaatcaaaacaaactgttcttcatatttactctaattttattttatgagaataaccgatttcacgaaatttgcaggtgaatctggaatataaacaagagaaaaaaataatttttaaactccatttgcactccatttggtcttttcgacaccccgcaaagcctttatttatgggcttttccgcgatttttcaagctactcaaactcgatcgtagccggcggtttccccgtgcaatcgtacattactctatttacatgcttcacttcatttacaattctgctggttgttcttccgatgacatcccacggaatctcagcgctttctgcagtcatgaaatctgtagtggttactgcacgcagtgcgatggcgtagtcgtatgttctttcatcacccataacacctacggaacgcatgttggtcagggctgcgaagtactggtttacttctttgtccaggccggctttggcgatttcttcgcgccagatggcgtctgcgtcctgtaccatctgtactttttctgcggttacatcgccgatgatacggataccgagcccaggaccagggaatggctgacggaataccaggtaatccggaatgccaagttccagaccggcttttcttacttcgtctttgaacaggtcacgcagaggctcgatgatttctttgaaatctacatgctccggcagaccacctacgttgtgatgagatttgattacggtggattctccgccaacaccactttctacaacatccggatagatagttccctgtaccaggaagtccacagcaccgattttctttgcttcttcttcaaatacacggatgaactcttcaccgatgatttttctctttgcttccggttcttccacacctttcagtttctcatagaaccgttcctgtgcgttgacccggataaagttcaggttataatttccgtccggtccgaagactgcctctacttcatcgccttcgttctttctcagaagaccgtgatctacgaatacacaggtcagctgatcgccaactgctttggataacagaacagctgctacagaagaatccacaccgccggacagtgcgcacagcactttaccgtcgccgactttttcacggatggctttgatagattcctctacgaaggaatccattttccagcttccggcacaaccacatacgttaaatacgaagtttgccagcatctgttttccttcttttgtatgaaggacttccggatggaactgggttgcatacagtttcttttctacattttccactgctgctaccggacagtccggtgtatgagcgataatcttgaatccaggcgctgcctgctcgatataatcgttatggctcatccagcagatggtcttttcggatacattttcaaataatgcagaagactgatccacggttacttcaatcttaccgtattcgcgaaccggcgctttgcatacttttccgcccagctggtgcatcatcagctgagaaccatagcagataccgagaaccgggatacccagatcatagatttcttttgcataagaaggagaatcctccaggtatacactgttgggaccgccggtgaaaataattcccttcggctccatagctttgattttttccaaatcggttttgtaagaataaatttcacagtatacattacactcacgtacgcgtcgcgcaattaactgattgtactgtccaccaaaatcgagtacgattacggtttctctcttcatgaacgtctcctcctgattttctgatatccattgtttctgcccggttttcgccgaagctttatatttctctttatttctaaagtaccctatattataaagtaccctctgccttttgacaagtcccatgttctttccaccaggcaagcaatttttctttctcattcatctctggctgatccagtaccatctccagtagttcctgaagcacagctcccatctgcggtcccggtttcattccttctgcgatcaaatccctgccggtcactgccagtgttttcagcgacacacactggtgtttttccatgatctcatggtaaagtttttccacaccgtcgatccgcgccagcttctcctctctcagatacatgctctgcgccaggttatccgcccgctgtaccttcaaaaacagcggaaacagatcttctcccactttgtagatcgcccgccggactgctttttcttccggtgccggtcgataatcgtgccagtagatcagatgtgtcacctgtgcgatcgtatcgttatcaaacttcagtctgcgaagaatttttttcgcgatttcttttcccgccggaccatgccctttaaaatgatccacaccgtttgcatcggtcgtccgcatacttgcttttccaatatcgtgaagcagcatcgtcagacgcaggatccggtctttttccgtcaggctcagcgcctttaatgtatgttcccccacattgtacatgtgatgcggggtattttgcggcgtttccatgatctcatcgaactccggcatgatgatccgtgtgatgccaagatcatacacacttctccacatctccggacgatccgacatcaatagtttcactgtctctgtctggatccgctccgcactgatctttgaaagcgtcggtgccagttccacaattgcctttttggtattttcttcaatctcaaatccaagctgcgctgcaaagcgaaccgcccgtaaaatcctcagtgcatcctcaccaaaccgttgccacggatcacctacgcatcggataatctttctttgcagatcctgcatcccaccaaactcgtcaatgagcccgcggtctttgctgtaagccatggcattgatcgtaaagtcacgacgtttcagatcttccgtcagatttgaggtaaactgtacctctttcggatgcctgccatcttcatattctccgtcaatccggtacgtggtcacttcatagccgacaccatgtaccatgaccgtcacggttccatgctgcagaccggtgtccacggttttggaaaatagttctttcacctgataaggagtggcagatgtggttatgtcccagtcatccggcgttctgttcaacaccgaatcccggacacagccacccactgcaaatccctcatatccatgcgcctgaagcacatcaataatcatgtttactgctgctggtaactgtaaccgcattctatccactccttttctgtttcatgctattcgttctgaacaccgataacagccgaatgcctttattgatgttcccacactttttcttttagtatgctctgccccagtataccatctttgtcgccggttttccacagcatacacaggtatctgccagatgttcctggttgaatgggatacaacgggaagttgctgctgtatcttctttgatcttatcctcacatgcctgatcgccacaccacatagctttaataaagccaggtttttcattgatggtctttacaaattcttcgtaggtggttgctgtataggtatgtgcatctctgtgtgttcttgctctctccagcatatcattctggatagtgttcaggatttctgttactttttcagccagttccggtaatgcgacaacaatcttttcaccggtatctcttcttgcaacgactgcctgatttgcctcgatgtcctttggtccacactcgatacgaaccggaataccacgcatctcctgctctgcaaatttgaatcccggactcttgtcggtagcatctgttttcacacgaatacctgccgccttcagtgcagcttccagttcagcggctttctccagaacgccttcttttctctgctggatcgggatgatcactgcctgtaccggtgcgattctcggcggcagtttcaaaccgctatcatcaccatgtaccatgatcagtgctccgatcatacgggttgtcataccccaagatgtctgatgtacatactgtaatttattttctttgtctgtgtactgaatgccgaatgcctttgcgaatccatctccgaagttatgactggtaccggactgcagggcttttccgtcatgcatcagagattctatggtgtaagtagcttctgcacctgcgaacttctctttgtctgtctttcttcctttgataaccgggattgccagtacctgctcgcagaaatctgcatacagattcagcatctggatggttctctcttctgcttcctcagccgttgcatgtgcggtatggccttcctgccacaggaattctctggaacgcaggaacggacgggttgtcttctcccagcgcataacggaacaccactggttatatactttcggcagatctctgtgggactggatctcttttgcatagaaatcacagaacagagtctcagaagtcggacggatgcacagacgctcctgcagcggttccagtccaccgtgtgttacccatgcaacttccggtgcaaatccttctacgtgatctttttctttctgcagaaggctttccggaatcagcattggcatatacacattttctacgcctgtttctttgaatcttcggtcaagttcatgctggatattttcccagatcgcataacccgccggtttgatcgccatacatccttttacactggtgtaatcaatcagatctgctttttttactacatcggtataccactgtgcgaaatcttcttccatggaagtgatcgcttctaccatttttttgtcttttgccatctttatttcctccatttttgttctcacgtactctcggaatctttctgtgcctgattttgcgagatgattttttgtcagttgtatccgagagtacatttctctatctccaggggattccagatcaaaataagcacctgatccccaaaaagggaccagatgcttatccggcggtaccaccctaattaacagcccgaagactgctcactttctttcactcttttttaacgccaaagtcgcggtctgcttactcacagacagctccggggtcggttccacacactccgcacagaaatcttccacctctgatttcctctctgttgattgtcacctgtgtactattcccttcatcgccttttttattttattgctgataggattttatcggaaactccctgatttgtcaaggggttgctatccgactccctcttattttgttccgaagattctgtctcctgcatcgccaagacccggtacgatatagccgtgatcattcagatgatcatccagtgcaccgatatagatatccacatccgggtgtacttcctgcagtttctttacaccttccggtgctgcaatgatacacatgaagcggatattttttacacctttctgtttcagcatggtaattgctgcttctgcggatccaccggttgccagcatcggatcaacaacgaaaatgtcacgctcggaactgtctgccggaagtttgcagtaatattctaccggtaccagagtttccggatcacggtacagaccgatatgtcctacttttgcagccggaatcattgccagcataccttctaccattcccaggcctgcacggagaatcggtactacagccagtttctttcctgccagttcttttgcagtcatttttgtgatcggagtttcgatttccacatcttccagtttcagatctctggtcgcctcatagcacatcagcatggcgatctcaccgatcatttctctgaattccttgctgcttgtctctgttcttctgataattccgattttatgttgaatcaacgggtgatccataactactacttttgacatttgttctcctttctgccgtttccggcatagcgctcttttatcattctgtatcacagtcgggaatttcattcataactgtatctgttaatgtattttactgcactttactctccgtctgtcggctcctcgatcagtttgattctgcggatgtgacgttcatcgttggaaaatggagtatccaggaatgtctccacgatcttaatggcaagtccaggtcctacaactcttccacccagtgccagtacattggcatcgttgtgttctctggttgcctgtgcacagaaacaatcggtacataatgctgcgcggattccaggtactttattggctgcgatagagataccgattccggttccgcagatcaggattcctctctcacattcaccctcaacgatggcatgagccacttttcttgcatagattggatagtctacggaatctgtgctgtcgcatccataatcccggtactccagtcctctgctgtccaagtatgcctcaatctccttcttcagttcatatccgccatggtcacaaccaattgctatcatgttacagttcctcctcttcgtttaaccttgttaccagttttctcatcaataattccagttccgtatagcactgactgtatacagtcagtggctgaccgtgcagggacggtatatctccgctctcccccacgtattcttttactgtatagacatggggcgcattctcatacgtttcccagatctgcgatttttgtttgtcctccatcgtcaggatcagaacatcattgttgatatcttcctgctctaactgcatggcaatatgacttggctgcgggtaaccgttgctggtcagtactgcctccgctttcggattcagcggttccggaaataataccaccatccctctggactcaatcgtcaacggattggtaagaaattttcttttcaggatcatctctgccatcggcgccctgcaattatcattggtatctacaaaaatcagttttttataccgtattaccatagttcatcctcaaacctgaatctttttctgacctgcagccttcatcaggcggttcataatcgcctggcccatctggggcgtatcaaaagcttctgaataaatataagtcactccacagtcgtcaaattcccgcagtacagcaaacagatgtctcgcaatgctctcttcatctgcccttgttccgatgcactttacaattccttccggataagcctttatactctcctctgtagcaatcacgcccaccttctctcctgctctgatcttttcttccaccagcgcacagattttctcctgtacagcttttggtgatccttccaccacggtcagatccgctttcggtgcatagtggcggtatttcattccgggagctttcggtttgactttactgtctgcctggatcaatccccgatccatctgcacctgaccgatcacacgtcttaccatctcctgattaatatatcccggacgcagaatcgtcggaatctcttccgtaaaatccacaattgttgattccagaccgatccccacgggtccgccatccagaatcatatcaatcttcccatccagatcctcttccacatgggaagccatcgttggactcgggcgacccgatgtattggcacttggtgccgcaacatagcctccccctgcccggatcagtgcctgtgccagcggatgatccggcatacgcactgccacagtatccattccaccggtcgtctcataaggcacaatatcgcttttctgaaaaatcattgtcaatggtcccggccagtaaactgatgccagtttttttgcactctccggcacctcttttacaattttctccagatcttccatatctgcaatatgaatgatcagtggattatcggaaggccgacctttcgcccgatagattttagcagatgcctgcggatccagcccgtttcctccaagtccatataccgtctctgtgggaaatgctaccagaccgccctgtctcagaatctctccggcttcccggataccttccatatctaattcctggggattcatgcgaatcacttttgttttcattttctttcaccttatttcttcacatctgataacagtatactagagtaacgtgcgatgggcaagtgtaaatttatcacaagacttctcaggctcctgcgattttttcattttcactttttctctgccaagctgctcagatattccaaggtaccactgcagattgcttttgccaccttgttctgatatttttcatccgtcagcaataaggcttcctgattattacttaaaaaaccgcattctacaatcaccagtgttgcctctgtctttttcagcatataataagtcctgttccctttggcctgtctgtgattttctttatccagcacttccaccaaatgtttctgtaatatctctgccagcttttttccttctgaagaatcctcataataaaagacctgtgccccatgaattgcttcttccgggtagctgttttgatgaatacttaatacacagtccggctggatcttccgaaccatctcacaacgtcttttcagatcctgtactttactgtttcctccgtctccttccgaaagatctacatcattttctctcgtcatatagacctttaccccgtttttttccagttgctttttcagccgttttgcaatctgcagattaatatctttttccttttcctgatgaatccctattttccccggatcactgcccccgtgaccactgtctatcaataccacaccattccccgctccggcatctgcccctgtaagtcttgctcccgtccttgccagccagaacacaccggtcagaagtagcaccgtcattcccagttcccatattttctttttcatcataaaaactcccggagcatatttattaaaatatatgcccgggagtctggttcaagtcctgtgtttttcattcttcatcctgacggttcatcatctgtttcatctcttcctcggaaaaatcttcctcttcctcgtcgagatcttcttcatactccgactcccccgtctgcagattattctgtgcagcaactgtactttcgtcttctttttttctggatgcctcttcatcttccagctctcgcatggtttccggcatcgcactgacaatcttatgtacttctttataagaagccataaaacgaatctgtgcctgattgatcagttctacaatttcattcatctcatcctgtacagcaatgtattttcgttttccatcagccagtttcgcatccacttctgcctgtacggctgccaggcatttctctgcttctttcttcgcttcgtccatcagttcatctctcgtagcaatggcctctgacacaatctgatctgctgcttttcttgcattctgtgttgtagtctctgcctgctgatctgcatcgttgagtacctgttctgctttttcatttgcttctctgataatcttttccgctttttcctcagattccagcaccagtccaccgatcagatcatagcggtcaatatatttttgatatttttcgctgatctcacgctccagtttttctttctgtttctgtttttcctgaattcgttcttccagatgagcgatttcttctttatgtgcttctttttgtttctgcagtgctgctgctttttcactgtcctttttcgcaagctgttttttcagttcctgaatctgctttgcctgttcctttttttctttaatcagtttgcttttttccgcatatgctgcgtccttcatctcgcgaacctgattcaatacatcatctttatcaaaaccacccatcaacgtcgttttaaatctttcttctgccatctctttttgtccctttcccttcttgtctatactccttttattttactgcagatactgtgcgatcaccggccatacagatgcccgctcaaatcccagtttccactcagctactcctgccagctgattctcctgtatcagtttcatcttctccccgatggactgttcatcttccacccagatggtatagattccatcctcagcttctacactcgctacattctgcccggcttcatcatcccagtaagtatccataccatgttcactgatataatttgcagctccatccattcccaacacttcgcttgttagatttcccgcaccaaatggctggatccagactcttgtatagaatggaatcgcattgatcactttctgtgccggcacttctttcagtgtatcttcgatacctgcttttacaaatccaagtgaagacaccgaacctgcatctgtgctccctgcataatgttcatcgtaacccataatgatcacatagtctgcaacaattccctgttctgttctgttataatgtttactgtaagtcggaaccgggtcatcaatggaaaatactattccctgattacggcaggcaatcgaaagttctcgtacaaactgaatataatgcggtgcctgttcttctgtaattgattcaaaatccaggttgattccatccaatcccactgaggccgcctgtgtcatcagttgctgaatgatattggcacgtgccgctgtacttgacaggaatgtcagattatccgttccactgttaaaattatcgatcagtccccagacctccatccccatagcatgtgcctggtttacataatcagcacttgccaacgaagaaattgttccattattatccgtcactgaaaaccaggttggtgaaatcgtgttcactccctgtgcatctgccaccatctgtgccaatgttgcgtttccatccatactggtcacctgatgaaacgcaagattaattttataatctttactgatattggtatattccggtacagtacttgcatgttcctcattatcatccttcggatccgaaagtacttctttttttatatatccactgtagccatctgccgtagcaactctgctccaattgtccagctcctcctgcagatacagcgtatctcctttttttaccttggccacaatagaactcttgatcccgcctttctgacgaatctcactatttttctgtgccgttaccaactgcagatcattccattttgttcgaaccaccacacgagccggatcttcaaaaacagtatacgtcatatccgtatactggctgacaaattcaagatccagataaacaccgccatcaatctgtttcagtatcacataatccgtcatctgagtacctgctgatgtcacatactgcgtactctcaggaacaatctgaaattcttccgttggcaacgtatacagcatcacctgctgctgactgtcccagtaaaatctgctgttaatatatgtagcaacgacagaattctctacataataccttccgtcgatcatttttacttttgcatcttcaagctcatggttcaccaccagccccgcctcatcatctccggtgagctgaaaatagtcttttccgtctatgattgttccggacggagtatattttttaataaatatagaaagaatccctgcgcagatcactaaaaaaatcaatatgatcaccgaaaaaaccggtgttatttttttcttcatttctgataacctcctactgccctttattataacaacagaatgatttcccgtcatctttttttgacatattttttgttttttctatatcgcaaatatattttatctttgaaattgacctgttgctcgcgtaaaagcaaagccacagcaagaaaaacctgagttttctgctgtggcttcttctttttgcaaaacagcttttctatgcaagggagggaaccttataggatattattgtttctctgctgctttacattttctgttttcatttataatttctgtgtataaccatcttctttcttcaccgcatcgaactccagccggagcagacgtccgtaagaatccggaacgtaatctctcatataggaaatatcttctgcgatcttatgtgctttccagatttccttcggactgctgggttctccgtccagccacaacggaatcccctgtgcctgataagcatccagttcctttcgaaaatcatccttttgcttcttattttttttcatgttttttgtgatatatgatcctttcttaagtgcacagcaccattatttttcgaaaagatgacactcgtcccatcaattaaattaattacattcatttttacactttggggaaaatacgatattatacgctaatgaattgaataaaattgtaaatagttgaaacgttttttgaaatgtttatagattatcaaaacagtggctggcctcacatcctttccaggaaccgtgccacctcttctggtttttattatacctgatttttcctataatgcaagaagaatattacgaaaaggccgaaaaccattaaaatattacacatttttctcaaaattgttgaattctgtctttattcgtcgaaaatcctcttccgtacggtttgcaatctttttctatcacctgcagaaactactgtgaaataacaaatgcagagattttaatcctttacatccggtttgcatatagtatataataacaatgattcaatatgctctttttgtagctagctacgctgaggctttttaaactgtacaattggattcgcagacaagtgaatgatacagttatttcagacacgctctagaacaatggttgatagtaaggatgtgatatctgtgaaaatagaaaaaattaatgatacccagatccgctgcacactgaccagcgaagatctggcggatcgccagctaaagttaagtgaactggcttacggatccgaaaaagcaaaagatctttttcgtgatatgatgctacaggctcaggatcagtttggttttgaagccgacaatgttccactgatgattgaagcaattccgattacaccggacagtatcgtactgatcatcacaaaagtagaagacccggaagaactggatacccgtttttccaagtttgctgccggtaccgatgaaactgctccttcccagacggaagggccgtctgttaccggtgcagacgacatcctggatcttttccagaaattgtgtgaaggacgactcaaaaagcctgttgcttcctctgaaaaaaataaaaccgaagattcctccgacagaaaaacaaagattcagccggatactgcagaaacgcactctgatacagaggcagcggaaaataacattgctcagacccgtccggatctgacccgtatcttcacattttccagtctggacaccgttatccgggcggctcttgctttaaacggatggtataccggcacaaacacactctataaagaccgtgagactacttacgtactgatcctgcatcagtccggcatgaatccggaagactttaacagagtctgcaacatgctctccgaatatggtaccggcaaagcctgcaccgctgcaacagaagcctatttcaaagaacacggtgagattctgatagctgatcaggcactgcagcagctgttattattgaatgtataattttcaaaatcaggtttcggttgaaatcggttcacggagtcaattattgatatgcaatgcggaaaaaaacgaaacggcaggacatctgaattcttcctgccgtttcgtttttctttacacgattttttattgtgccagataatcattaatctgatctaccagcagatctacatccagtccatgaaccatcgctgcttcttccagggtctctccctgtgcagacgggcaaccaatgcagtgcataccggcgcgcattaaaattactacgatatttggatcgatcgtaaccagatcggcaataatcatatctttggaaatttttctcattctgtttatctcctttcctgtgatacgcacattataataccattttctcccgtaggcaactattgtatcacaccaaaatcatacaaactcctgcgattgtacgtaaatttgtacttgtaatcctgcactacttatattagaatgagcatatagccgagagtatatcggtaaatacgaaaaggaggatttgaattatggcatatgtaatttctgacgaatgtgtagcatgtggaacatgcgctggtgaatgtccagtagaagctatcagcgaaggtgatggaaaatatgttatcgatgctgatacttgtgtagaatgcggtacctgtgcaggtgtctgtcctacagaagctatcgttgaagaataattattattttaaatataattatttccgcgcggaaaaaggagctgtacacaaaactgtgtacagctccttctttatgttatttagtaactgtttgctcccttcacagttacattattttttctttttgcgattttcctgcgtagcggcgaccatttttctggattgttgatgtcgccggatcgcttcatccaatcttcggtaacgtccttctttcctctccttcagttcaatatcgtgaatcaggcgttccatgattgcctgaaaacgttcttcttttgtcggttgttcagatcttcttttctgcttttcttcttttttttcaaaggactgctctgtcaaaaacttccgtggagttacaatctttacctgaatctgttcttcctgaaattccggctctgttttctgttgttttgtaataccctctcccgatatcctatgttcttccacttgcggaatttcatccttctcatgaagtttctcttttattgtctttaactgcaaaccctcttttttcagttccttgattttctgaaatatttccagatctttatcggtgtagtatcgatgtcccatctcatttcgtttgatgaacaagcccagttcctcttcccagtagcgcagtacatgaggttctacctgaaccagttttgccgtctcagaaatcaggtatctggtttctttcataatacaagtacctcctgcactcattatagagcatacaggaggtactttacaagaaaatctcttcgccttttttagtcctttttcgcgttaacaaaccgagtgtactccggcatccataccagatttactgtaccgatcgggccgtttcgctgtttggcgataataatttccgccatgtttttgttttccgtatctttattataataatcatcacgataaatgaacataaccacgtccgcatcctgctcgatcgctcctgattctcggaggtctgaaagcatcggccgtttatcatctcgtttttccaccgcacggctcaactgtgacagcgcaaccaccggaacatttaactctctggctacccctttcagtgcccgggaaatatcagaaatttcctgctgacgggaatcaccgccacgtccactaccggacatcaactgtaagtagtcaatgataataatatccagtccctgttccaatttgaattttctgcatttggaccgaagcttagaaatggaaatacctggtgtatcatcaatgatcagacgggaatttccaatcacaccggctccctcgatcaatttcgcccagtcttcatcttccagacttccggtacggatcttttgagaatccaccttagactccagtgagaacagacggttcaccagctgttccttactcatctccagcgaaaagatggctactgatttgtcttttcgaaaagccatatactgtgccatattcagaacaaatgccgtcttacccatggaaggacgagccgctaccaggataaaatccgaaggttgcagaccggatgtcttataatccagatccacaaagcccgttggaattcccgttacagttcccttcgtctgtgaagctttctcgatggtctccagggcgtttaacaccacctggcgaatcggaacataatctccacccgttctggtctgaagaagctgaaacagctgcttttctgtatcttccatgatttcttccaccggttctttatccagataacaggtattggcaatatcttcgttcatcttgatcagtcggcgcaacattgctttttctttgacgatttttgcataatgtcctacgttaaccgaagtaggtaccgccgtcagaagatcctttgcaaattccatgctgctgatctccggcggaacatccttttctttcagtttctccggaagtgtgacaaagtctaccggttttccttcgttatataattccaccatggaatcgaaaacaattcccatctgctgtcgatagaactcatctccggtcaggatctcggatgcaatcataatcgcctcacggttcatcatcatacaaccgatgacagagcgctccgcatcatcgctgtggggcagaattcgtttaatcagttcttcttccacggaagaattcctcctatgcttcttttaccacaaccttcagttcacctgttaccttcgggtgtaacttgattggcaccatagttgtacccagctctttgatcggagctgaaagctgcagtttctttttgtccagttcatatccaagctgtgcctttgccgcctccgcaatctcttttgcagagatggatccgaaagttcttccaccttctccaactttaatgcctacggttacctgtttgtctttcagttcttccgcgaatgcttttgcagcatccagattttcctgtgctactttgtcttcatgagctttctgaagtttcagatcattcatattttttccggttgcttccacaccaagttttttgggaagcagaagatttcttgcgtatccgtcacttacattaacaacctgtcctttttttccaagagcttttacatcttcaagcaaaataactttcatctttatatatctccttcatctagcattttctgtaaagtctgtttcagtacatctttcgcctctgtaatagagtaatgttccagctgcgctcctgcgatattcaggtgcccgccaccgccaaggcgttccatcacaatctgtacatttatttcgtcgatggatcttgcactgatataaatcgtattgcgataatctgtcagcacaaaagatgcttttacaccaatgatattcagcaactcatttgccgcctgtgcaccaaccactgtagggctgtcaagtccttcacttggacacaccgaaattgcaaagtgttcccgaaacagttctgcgtttcggatagcttctcctttagcccgataatcctcaacatgttcacgaaacatctttcttacccttgtcacatccgcaccacatctccgcagaaaagctgcagcctcaaacgtgcggacaccggtttttgtaagaaaattattggtatcgatcattattcccgcatacagactgtcagcctcgatattccggatccgaataccgtccgcaaaatattgcagaatctctgcaaccatctcgcaggccgatgatgcatagggttcaatataagataataccgcattctgaataatatctttactctgtctgtgatgatccagtaccacgattgtcttggtcatatacagaagttcttcacattctgtataacctggtcgattcgtatccactacaaccactaccgtattatcatccacaatctcttttgcttcatgacttgtgacaaacatccgggaatcataatcctgactgtgcaggaacccgtccatcagcggacggatcgatgaagtcggattattgattacaatataagcttttttctccagagttcttgcagcccggtagataccaatggcagctccgaaagaatccacatctgtaatcttgtgtcccatgaccacgatcttgtccttactgctcataaattctttcagagcatgggctttcactctggctttgactctggtagtcttttccatcatctgagattttccgccaaaatacgtgatattattgccatctttgatgacaacctggtcaccaccacgaccaagagccagttccatggcgatccgggccgattcggaagtatgcgcatacgaatccgcattgataccgataccgatactgatagttaccgccatctcatttccgatatttacagattttacttcttccagaatattaaattttttctcttttaactgttccagtgacttacggcgcatgaccagaaaatatttatctttttccagtttcttcaccacgccgtctatcgaagcaaaatacttgttgatcttacgatcaatcagcgcgatcaacaaagagcttctgacctcttcaacgctttccagcgcttcctcataattatccagatacaaaagtccggtcacaagctgttcttcctgattcttccgcatatactttttaagttctgtttcatcaaaaagataggctgcaatcaaataattcttctctttatctgcatctatgatctgagaaccatccagcagttcatcgatctctactcttcgcatgttcagccgaaaatcatgatcctgatatgcgatttcaaaatctcttacttcctccggcaacggaagtttgttcattgtcacctccggaaaaatatttccgataaagcgacggtacttctgatctttccccgtcagataaaggaactcatcattcatccagaggatctttccttctgcatccagcaaggcatagggaagtgcaaagtttttcatcagacttttctgcacctgaccatattgggtagcaaaagaaatcagttcgttgaggagcaccggtcttctgtgaaaatatagcagaatcccgagcaacagatacactgccgtaaatactgtaccgattcctcccgccttccagctgacgctgtataacaacacatccattgccaccagaagtatcgtcagaataaaaggccagcgcatatatgttgccagcttaccctttaacttaattccatctttcatactctgtacctattatcgattttccctccgcatattctatccccacagagtaaaaatctccttttccaagtacacctttgctttctttaaacaaaggtatgattttccggcactctgtcaaaaatgacaaaccaccaaattactctcctattatatcatttcccgcgcaaagaaaaaagtcttttctttttaaacaagaaaaccgccatcggtttcccgatgacggtacaacaaactttttgaattagtctgttacatatggcataatagcgatatgtcttgcttttttgatttctacagtcagagctctctgatgttttgcacagtttcctgtgattcttctaggaaggatttttcctctctcggaaacatattttcttaatttatttacatctttgtagctgatttcattgttttctttaccgcagaatacacaaactttttttcttctgcgtccgcctcttctcttcattggagaatccggtctttcacttttattgtaagccatgaatattacctccttatcgaaatctaacgattcgcacccgaacctgggttcaatgcgtattagttaaatggcagatcctcatcaattccatccggaatattcataaaaccgtctgcagatccgcttccacctgctgtcggagcggatggtgctgcctgaccgccaaaattaccgccacggtaattgtcgctggctgccttgctctctgcaaactcctggtcttcaactactacatccgtggtatagaccttctggccgtcccggtttgtgtagcttccggtctgaattcttccactgactacaaccttcaatccctgacggaaatacttctcagcaaattctgctgatcttccaaaggctacacagccaataaaatcagccgttgcttctccgtctctcttgaatcttctgtctacagccagcgtgtatcttgcgattgccattgaattgtcacctgctgaatatcttacctcaggatctcttgttaaacgacccattaaaataactttgttcatattcttacctctcttgtaaatgtatatacttttacgggatcttacaaacctttaatgggcttggcacttaagaaaaattaagcttctttcttaacaactaaatatctcattacattgtccatgatacgaacgtgtctttcaacttctgcaggacaggttgcatctgcttcgaactggatgaaatagtagaagccttctctcattttctgaacttcgtaagctaatcttttcttaccccattcttcaacttctgtaactgttccgccgtaacgtgctacatagctttttgctttctctactacggcttcacgagcttcatcctcgatttttgcattcacaaccaatgctaattcatatttgctcatgctgttttacctccttttggacttttggcttccggtttcagtaccggaaacaaggataaattatatatcacaagacgatattctaccatgattcaaaaacaatttcaagtattttcttcactctttttctgtaaatttcttgtgtttttttccaccagtttccgtgcaatcatgatttgatgaccgcacccggtgcatttcagacggaagtcagcacccacacggagaatttcccattcgctgcttccacagggatgttgtttttttaattttacaatatcccccacttcatactgatatgtcatatttttatttcccctttactttaatctgtgaaaaaatttgaccaattggtttctggatcagaagatctgcattacgatcctgtggtgtggcacctttattgatcagtaccagtgctcttcccctgaaataatccagcagaccggcggccggatatactgcgagagatgtgccgcccacgatcatcacttctgcctctgcaatggtacggatggcatccgatactacctcattatccagtccttcttcatataaaaccacatccggcttgatcacaccgccgcactcgcattttggaacccccgcagaatgcagcatgtacgatgcatcaaaaaatctatgacatttcatacaataatttctgtgtaccgatccgtgaagttccatcacatgtttacttcctgctgcctgatgaagtccgtcaatgttctgtgtcaccacaccggtaagctttcccgccgcctccagttccgacagttttttatgtgccgcattcggctttgcatccagtgccagcatcttatcccggtaaaagcggtaaaattcttcaggatgccgcataaaaaacgtatgacttaaaatagtctccggcggataatcatatttctgattatacagaccgtccacactccgaaaatccggaattccactttctgtagaaactccggccccaccaaaaaatacgatccggtcatgttgatcaataagttcctgtaatttttccacatcctgtcccatgatacatcctccttatccacatatttcacaggtttcttccacccattcacattctttcacttctgcatatctgcttttatttatatgttccgacccagcgcgcctgtacaacaaaacgcaccgattcatcggaagtacaggtagacaatgttactacataatcatcttttccaagtcccagtgccttcatatccaccttcgactgttttgccatcttcttcacataagcctcaaactgttcatcatgtgcactgaacaatgtatatacatcactgcccacctttgcatactgcatggaaaaaatctcatacctgtattttccgttcggcgtacagatccacaggtatttgctgtctttgtatttttcactttcgtacatctgttttagttttccgaacattgaaccgtttttcatattatgaccatagatgatggtattgcaatcagaaaaatcagatgcattggtagaatcaataaatacagaccccgcaaaattataagtctttttaattgtccggtgcagataatattcattatcttctccctgggcaattggataactgatagatggaattgcctccagctccagccatcccactacatcgtcattgattgcttttaatgcgtcaaaatccacttccggtggattgacggtaagttcttcctccgggatcagatttccttcctcatctttcttctcttccaccacttccaacggttcactgctctgcaccgttgttgcttctgccacagcatgatattcatccactccttttttataccccagatagatatttaccagctgatacatagagaagcagaatacacacagtgcaaccagaaacagcagtttccagaagattcccccaccttttttctttttcttaactgtcatctctcactaactccttctttctgtcttccattctgttgtaccgtttcctgattcatacttttatacaggcatggttcgaaactcatccctgaaaatgaatcgtgatcggacagatctcgcagtcggtaccgacacgcatcgccggtccccagacaccaaccccggaagttacgatactgtgcaggtttccttttttcagataaccacaggcattttcccacatcagtttgacagtcagatttcccgggaacatctggccatcatgggtatgtccacataactgcatatctgcacccgctctctcaagctcttccagttgtttcggctggtgttccagtacaatgatcggtttagccttatccagaccactcagaatcacttccggctccatgcgatttttagttccgtcacccggcttttgcgcatcttttcttcccaccagataaaaagcatcatcgatcagcatcacttcgtcatccagaatccggatctttgctttttttgcaaattcatcaaatcgtggatcacgcatctctttagcctgagacgccacagaaaatccaccaagtaatcgctctgtcacatcatgattgccaaacacaccaaacgaaccatatctgctcttaattcccgccagtgtctttgcgatcctgtccgggttctgcacggcttcatattcattatcaaaaatatccccggcaaataccaccagatccgcattctgatcattaatctttttcaccatccgctgcatctgcccgtttcccacactataaccaagatgcagatccgcaaccagtaccactttcagattcctgttgtctccacagtttttccggatcgtcacttcatacggtttgacttttacgatattagaatgcacgataccataagcactgattcctccaatcaatgcagtcagaagaattcccacggatacatatccaactttactaaaaaagaaatcatgtattttccccggtattttcttcagtaccagccgcaggatatctgcaactgcaataaatatcagaatgtatgcaaaagttcccagccagtaattactgatacgctttaccagtacctgcaattctgaagaaggaagaaggaatgcaaataacagtgagagtgccaacatggaataaattacaatatatggcactgcaaactttccggagtgaaaacgttcggaacacgctgtcaaccacttgtgcacccgatgaaggatataaaggtttaaagatatataaaccggtataataatcagtaaaatcatattgtctcctctatgtcataccgctccttttacagatccagtttcatatctccgtccttgataaaattatgttttctcataaactgtgtaaataccactgtaagaactgccggcagcataaactgtatcacaacaatcttcagcaatactacaaccggatgttccgtctgtgccatcacctgccaggtcatgatctgaccaacaaagcctgcagatcccatccctgagcctgtcgcattgttcgtcatatgaaacaacattgtggaaaccgggccaagcacagcgctcgacagaatcaccggaagccagatcagtggttttttaacgatattcggcacctgcagcatggaagttcccacaccctgtgcgatcagaccgcccacaccgttttcccggaaactcgccactgcaaatcctatcatattacagcaacatcccacagtagcagctcctgctgccagcccggacagattcaggattacacctaatgctgctgaactgatcggcaatgtcaggatcatgcccataagaacggataccacaattcccatcaaaaatggctgttgctccgttccccagttgatcagaccaccgagccacgtcataaaagaagaaatcgaaggacccaccagaacacccacggcagagcccgtaccaatagaaagcaacggaaccaaaataatgtccagccttgtttttcctgcaatcagatgaccgatttcaatacctacatacgcggcaataaaggcgccgagaggttctcccggtccctggagtgccagattaccatccaccaataatgttccggccagtaccttcgaagcatagccaccgatcataccactggtagcagctgacagtacaaccattggagattcctgaaacttatacgctacacccacaccgatcccggcacaggttaacccggctgccattttccccaccgcatagatcagtgtcccgatggatcctcctgcaagcatcccgatctgctggatgatcgttccgatgatcagtgttgcaaaaagtcccagtgccattccactgagtccctccacaaaaatccggttcagacatttcttaatcagattcatacataacccctttcctgctcatcactttattcctgttctttccaaagtgtaacacggttacttccattcttccagtactatttgacaaatccacagcataagcatataatataattgataacgcgggatggagcagtctggaagctcgtcgggctcataacccgaaggtcgcaggttcaaatcctgctcccgcaattttttatactcaattttaaataaaatcatcacacaaacaccatccgacactttttttctgtgtcgggtggtatttttttactcgttgctcacgaaaaaagaagagtgaccgttttttaacagccagctcttctttttgtcttttattcttctatttttacagcagatgtgcacgaatctcgtctgcgctcagcggggaaagatatgccggagccacatcaaagaccgtcttacatcctgtcattccttctgctttcatacggctcagtgcccttgcgtaagcaaccagtacactggaagtaaattccggattggattccagtttcaaagaatattcgatcatctgatgggtattttcattttcaccggtcataccacttctcataacaaatccaccgtgaggcatcttgttatgaacagcgtcaaattcttcttcagagataaagtttactgtggtatcgtattcatcaaaataatttttcatagttttgatagattcttcaatctgttttttatcagcaccttcctcggcaactacgaagcactctctggtgtgtttctgacgtgttgtcagttccggctgttttccggctcttacctgatccatcgcttcttccaccggaacagtatactgaataccacgttttacacccgggattcttctgattgcatcagagtgtccctggcttacgcctttaccccagaatgtataggtttttccgtttggcagaatggattctgcatagatacggttcagagaaaacagacccggatcccagcctacagagatcatagccagatgaccattttcttttgcggctgcatctacatttgcaaaatgctgtggaatgtttgcatgggtatcaaaactgtcgatgacattaaaatcttttgccagttccggcgtctgttttggaaggtctgtagcacttccgccacagatgatcataacatcgatctgatccttcatattctttgcatcttccatggtatatgcttttgcgccaggtgttttgacagttactgttgcaggatctcttctggtaaatacacctgccagttccatatcttcattctgacggatcgccatctcaacgccttttcccagattgccataacctgcaataccgattcttatttttttcatcgctaattcctcctgtactctcctatctatttccggaatctttctgtacctgctttgtcagaagagactccgattatgcatatttccgcctccgtaccggcggttttcggggatcacgttctgagactgcactttgtgttcaccactttacctttgcacagtcataaatctccttttgtatcctatcacattttgatgtcacgttcaagccattcataatgttcttccaatgccaaaagcccttcctgaatatttccctcaataagacaaatggcaatattcttatgaagtgcgatccattcttccgtatcaatggatgccgcctgccgcaaaaccacctcaccctctgagcgtatgatctcagacaaggcattcgtcagaagaatcaggagccggttctgcgaatattcaaataccaggtggtgcagttcatgatccgagcggatccgttcctcaagatctccgttttccatccggttgataatcgctcctgctttttcctttccttcctctgatatcagcgcgcaagcctgtacatacgcctgtttttccagaaccgaccgaagctgattgacttcccggtaattactctcttccatcagaaccagcatggaaaaaacactgctgaggctttctcccatccggtttaccagaaaatttcccttgccgtgacggctttccagaacgcctgtatgctccaggatccgtagtgcttcccggaccgaatttcgggaaatccccagtgtttccatcagttcccgctcggagggtatcttcccgccataagaaatatctttgttttttatcagtgttttcaaatattccagtacctggtcataggcttttggtgaagttgcctgtacactttccttatccaactgtttttctcactttcttacttttcttccctgccagacccacagccggcatgatttccggacaaaaatacccgacatatttttacatcagacttgcaaaaacagaagatgttaccaccgtcagcaaacctgccacagcgattgcaagactgctcatcgcaccctcgatctcacccagctccatcgcttttgctgttccgatggcatgagcggcagttccaagagccagtccttttgccaccggttcttccagatgaaagagcttacagacaagatctgaaatcacatttccaaggacacccgtaatgacgataactgctacggtaatagttaccacaccgccaagttcttccgatacccccataccaatggctgtagtaatggatttcggaagcagagttacatacaactgagagttcagatggaacgcccgcgccaggatgtaaacaccgaccatacttgccagcaccccggacagaatgcccgctgcaacggctttgatattattcttcagcagttcaatctgtcgataaagggggacagccagactgaccgtcgccggtgtcaacagataactgatatactgtccaccttcgttataggtatcataatcaatatgaaacagaatcagcaccaccattacgcagatgactgcaatcaacaacggattaaaaattgccagtttaaatttctttttcagaagagttccgatctcataggccaccaaactgatcgccgcaccaaaaaatacggaatttgtcaggaaatctttcatttttcttttccctccttacgttttctctcccagcggatcacccgctgtgtcacctgtccggtcactcccatgacaagtacagttgttactaccgtcactacgaccaccggaaccacgaccggtcgcagcacatcccatgcattcaaaagtcctactgccgccgggataaacataaccggcataatttctatcagaaaatcagcggctccctctacctgatccagctttacaataccggtaagaagtgcagccagcaacaataccagcccatacacactggccggaaccggaagtggaatcaccatacggaaaaactcgccgataaacgagaacaacaatatcatacaaaactgtcttacgtgcttcaaaatatttctcctttcactggtagtaccagtttcagattatactgacctgaccttttcctgtcaaggagcaaattccccatagaaattcaaaaatctccggagattcattacaaatcgccggagatttttcttcaagaaatgctacctgctcatatttttgcaagtccatagtcagaaaccttcctgcaaacaaacttctgtcagttttctgaccttttgactctgctgtccattatcccagcattttctccagatcttccttcggatccccgattggactgatccggtagttttctaccagatactgcagcacattgggagacaggaatgccgggagagacggtccgagataaatatttttgattccaaggtgcagaagtgtcagcaggatgcacaccgccttctgctcgtaccaggaaagcaccatggaaagcggaagttcattgactccgcagtcgaaagcctgtgcaagcgcgactgccactttgatggctccgtaggcatcgttacactgtcccatatccatgatccgagggaaaccgccgatgcttccgagatccagatcgttaaaccggtattttccacacgccagtgtaagaatgatcgtatcggacggtgtctgttttacgaattccgtataatagtttctgcctttttttgctccgtcgcagccgccgatcaaaaagaaatgccggatcgctcctgcctttaccgcatccacgatctgatctgctgcctgcaggatcgttccgtgtccaaaaccggtggtcagcttttctccaccgttaattcccttgtactgcctgtcttccccaaatcctccaagttccagtgccttttcgatcaccggtgtgaaattttttccgtcatctacatgtaccacacccggataggaaactacttccgtggaaaagacgcggtctgcgtagctctccttcggtggcatcagacagttggtcgtaaacagaatggctcccggaagatcagcaaattctttctgctggttctgccatgccgttccgaagtttcctttcagatgaccgtattttttcagttccgggtatgcgtgtgccggaagcatctcgccatgggtatagatattgatgccctttccttcggtctgttccagaagcagcttcagatcacgcagatcgtgaccggtaaccacgataaacggccctttttccactttcagcgaaacctctgtaggtttcgggattccgtaagtctctgtgttggcacgatccagcagttccatacaggtcagattaacttttcccgtctccagaaccaccgggagaagttcttccatgccaagatccatagacaacgtagccagtgctttatataagaagaagttcacttcttccgactgatatccaagtaccatcgcatggtatgcgtacgctgcaacaccccggatgccgaataataacagggattttaacgaccggatatcctcgtctgcattccagatttgttccatatcataattgtctgtatttccacattttgccacacaggttccgcatcccggtgcgattctgtttttttcctcttccacacgctcgatcatcacacgaatcgtctcttcgttgaaacttacattggtcagtgttgtaaataatccctcgatgatcacccggtcggtatcagcggtcttcggattgttgccgcaggtcttcgcaagaccgatcagtgcccctgtcagttcatcctgcgcttttgccacatctgcggtctttccgcacactccgcggcttccggtacatccattgcatcctgctgtctgctcacactgaaaacaaaacatatttttctccattttttgtactccttttatcattttttatcgttttctttacttttaccttatctatctcataagtatccctaatttttctgcttttatccttcgtactatgtctctctcacagatagcctcacggattacaccgtttggtttttcccatccgtctgcctggaaaacgttctgcccgttactcccggatcgtaccgtcagttccgaccgtgatcacctgccatggcagccgttttccgctcgcttcaagggcacgttttgccgccatctcaagtcctccgcaacatggaacctccatgcggacaacagtgatactctgcacctcattctgccggatgatctctgccagtttaacggcataatcggtgctgtcaagtttcggacatcccaccagcaccacacgatcttttaaaaattcatcgtggaacttcgcataagcgtacgctgtacagtctgccgcgatcagcaggttcgctccctcataaaaaggtgcatgcaccggcagtaatttgatctgtaccggccactgacgcagacgggaacgctccgctttcgccttttcttctttatttttcagcactgccgcctcgtcatatgcttccgcttcccgttcaataaaatgaatcgcatccatcggacatgccggaaggcaatcccccagtccgtcacagtaatcgtcgcgcatcagttttgctttcccgtttaccataccgattgccccttcgtgacaggccttagcacaggcgccacaaccgttacatttatcttcctctatctgaatcactcttcggatcatattcgattcctccttattttctgtatgcactcctgaaatctctctatatctgatttgacacaaatgcatttctgtctctgttatgctgtccttcttctctttgcaacagctcccttgcgtttacaaacagaggatactataatatcagataaaaatatgttgttttaaccacaaaaaggagaaaaaatggattttccaatattaaaaaaaatccccctgttttatggtgtgaaaccggaggaaattccgtctattctgcattgtctctccggacagatccggtcgttttccaaaggggaaatgatcttttgtgccggtgaatctattacctctgtaggaatcgtactggaaggttctgttcatattgaaattgacgatttctggggcagtaaaaatatcctgaatcacgtcggacccggacagcttttcggcgaagcctacgcctgttccccttcggaaccgctgatggtcaatgtcgtatccgtcacgcccagtcagattttatttctggatgttccgaagattttgcatacctgtgaaaaaccatgcagtcatcaccagcagatgattgaaaatctgctccgcatcatggcaaccagtaacctgcagctttcccgccggatcctgcacaccacaccgaaaaccatccgtgaacggctactcgcctatctttcctatcaggaactgctcaccggatcgtctgagatcaccatcgccttcaaccgccagcagctcgctgactatctaagcgtggaccggagtgcgctttcgaaagaaattgggaaaatgcagaaggacgggctgttagaagtgaaaaaaaatgaatttgtcctaaaaagcagagaataaagaataggatgccgtgtgcatcttcgcagagtgttcccgatttactgaaaaacagtttttgtaagacactaaacagggcaaatcgctctttcgaacgattcgccctgtttgtgtttttatttacttgatttttgtattattcagcctcttcagctgtctccggttccggtacactgttgtgaactgcggtgcaggatacaacaactgcttccggatctgttttcagatcgatgttcggattcttggcgatctccagatctttgactttaatcacatcaccaatcttcatctcaccgacatccacctgaactttatccatcaggtcagcaggcagtgccttataagaaatttcttccagatcttcctgcagaacacctgcctctactttctcatggttgagcagaacgatttccgctacggaatgtactttctcggtacttaccagtgcctggaaatccatctcatccacgcggtttgccattgcattgtaatcaacctctttgatcagtgcatcgtaggtcttgccgtctacttccagcataacctgacttcctttgttgtccgtcttcagcagctgatctactgcctttttcgtcatctggatcggaagagatccttcaatctctctgccaaacagattacctgtgacatagccttctcttcttaatttctttgctttgacgtccatgcttcttttttcagcttttaaagtattcatttatcttttcctccaaactgattgcttagcagccttctacaaagaggttttgttaagtattatatataaatgtgctaccgtctgccatccggcaaaccgtatggttaatagttacctgattcagatattatccttcaatggcgatgtatttgttttcttccactgccgattttgcttctttcttcggaacgaacagtttcagaataccatgtttgaattcggctttgatctcacccggatctacttcctctcccacatagaagctacgtgtgcaggcacctgcataacgttctttacggatatattttccggtttctttttctttctcgtctttatcaaggcctttggccgcctcgatggtcatataaccattttccagagaaacctttacttcatctttggcaaatcccggaagatctatttcaaattcatatccattgtctttttctttgatatcggttttcatcacatgtccggctcttctgccgtacagttttttctctgctttgtgcagttccttgtcggtatcgaacggaaaataatcatcaaaaaaatcatcaaacaaattctctccaaaaatactaggcatcaacataagtcatctctcctttttattcatcatgtattattaccttgtttctttggaactgggatgcttcaggagctttcgaactttttcttcgttctttttgttcccttcctttgttctagatgtaatataacacttcaatcagcactcgtcaagggggagtgctgattctttttgtgaagattttgtgtccttctaaaatgaaaaacgaacttccgcccttactttgtttgccacaacatcaaggtagaagttcgtttttcaattagttatcaggtcttcgtatgccgatttacatatttcgccttatattttgagtacacgatcgtctggtctttatacagcccgtaatatccggatactgcatagctgaccgccacagccagcagataatacgaaacgccctggaaaccaaacaactcaaaggctatcagtatagaagtaaccgggcagttcgtcacaccgcagaacacagcagtcatcccggcggctgcacttaaagacggtgaaaatcccatgatctgtcctgccagacagccaaaggtggcaccaatggcaaacgaaggaacaatctccccccctcgaaaacccgcacgcatcgccagtgctgtcagaagcattttccagaaaaagtcaaaggtctgcgtctgtccatgttccactgcctgctcgatcagctgattacccgcacccatataccgatctgtcccaaggatccagtacaggactactaccagacagcccgccgcgaagacacgcagatatggatttttcagccatttatcatatcccttgctcacatattccagtaacagacaaaaaaggatactgactgcaccgcagcctacggcgatgatgcccattttaatcccgttttccatcgaaaatgccgggattcccgtgacatgaaagttctccggatggattccgaaacttcccgcaaaatcataagcaaccagcgatgccaccacacagggcagcaaagccgcatagtacatcacacctacgctgaccacttccatggcaaataccgctgccgccatcggcgtaccaaaaacagccgaaaacgcagcactcatcccgcacataacgatcacatggcggtcttcctcatccagatggatccaccgtcccagttgatttccgatacttcctccaagctggatcgccgcaccttcccggcctgctgagccaccaagcagatgtgtcaatgctgtagcgataaaaatcagtggtgctgaacgaagcgggacctcatcctgcgaccggatcgtagagagtacctggtttgttcctctgtcctcttttccaatcttctgatataaaaatacaatcaacagaccaccaaaaggcaataataaaacaaccgccggtctgtctgcccgaaactgtgtcacccaactcagacacccggcaaataaactgctggcaccgccaaccactccaccgatcagaagtgccagcaggatccatttgacaaagttgctcatatcctgctgtatccgttttccataataatgtgacatcacttccagacggtgatgtccctttttcataggttccatatattcccccgcttccctttcctctttcgtatttccgcctcattttcccggaatcatactttctttcagtatacgctatccctgtatatttttccagcgcaatgaactttaaatatcatggaaaattggttcactggcgcaattattgatatgcagtgcaacgaaaaaacagggcgaagctgcttccctctcagcgttcgccctgttttcccttatttcttttactccctcacatcactgcctgatcctcttatgcgtagattccctcagaatctgtaatctcgtactcaaaagtcttcagatttgcgcgcagtgttgcactctcgccctggtttgtccagataaaggtaatgatttcaccttctgtggatactgcaagttctgcatcaaagccgaacgctttggatacgtttctaaaatgcagaagtttcaactgctcttttacgatatctgtcttcatcagttcttcgatctgtgctgcggacagattggtacggttgatttctttatgaccgccggcaccggcacgtttaacagcctcgtggtcgttcttgccagcgaaaagatccaagtaccatacctgcggttttccaggcatgaacatctgcagtgctctggccataagcatttttttgtcatcttcgcccagtgcactgtaataagttgcatttacctgatagtatacatttttctgaccatgaagatctttcacatatccgcctcttgcaacaacagtgtcgatgatctgctggattctttcttccgggatcagccccttcagatccagaagcgggattccatcgtggcagcccagcatgttgactacatggatttctttttccatcagttcttttgcccatttttccagagtggaaccgttgccgctttccagtgcatcgatgatcattcccggaaggaagaaatcgtaggtcatgtaaccctgttttgcaatctgttcatagttcttctctccgtagcttgcatggatctccggaagaagggtcaggttgtatttgtctgccagttttcgtactttttccagtacttcccatgttcccggctcattcaggaagtttttttctcccggctccttcggtgcataagcaaatgcgtccagacgcacgatctttgctccatatgcagccagcgtcttcagtgtttcgtcataaaactcccataccagtggagatttgatattcagatccatctgtcccagatattttctcttgctctccagaagttctaccacgctatctttgcagaaagtatcaatgttgagttctgacggttttttacctgctgcaatctcctcattgactttcttcgcgatcagatctgctttgtaatactgtacctttgccacctgcataatatcctgtgcatccagtaccggatatttaatttcctggtagaacgtattccagtaaggcacattttttccgtccgggaaacgtaccatcaggatgggaagccccggtttacggaagaacatatgctcgatcagttcctgatccggctggatatatccttcttcagtcatggttccctttccttcccagaacttgttccagtcgataaagaaatcacggtatttggagttgtcgccgtttttcaggatatcctgaaactgtctggataatacagaagcatggttcaggataaaatccagtttcagattaattcccagttcttccagtgcttccagatcttttttatctgccagttcttcattcaatgtgtaatcgattacagagaacccgcgatcaagatccgtattaaatacgctgggcagaatatagaaggaagaaaatacatcctttaattccggtttctgtaaaaatccggtgatatcactgagggttccgcctacgctgtccggatatgcatttaacatcggttttgcatctgctgtaacggtcattttactcatgcttctctctccttatattcttccctgatccataatctctttgtattcgtcataggataacagttttcctgctttggatacgatcactttcgctttatgagcctggctctccagcatatcctgttccagttccagtaccatggtggtaaatgggctgtctacagcaccgtcacggtttcttgcttttctgtgtgccatagtctcctgcggagtactgtttaacagaaccgggatatctacacccttgtaattgtcactgtttccgtgtgtccactcgatgatcaggatctcggtatcagagaaatccacttcttcataccacagttcggtatcttctcttcccatccgtttcagccaaatcttttctgccttgtttttaaagctttcaacgatttcttccacttctttgaaatcgatttcattcagggtaccaagatatcctctcaggcctgtcttaccattctccagataagattcataccagtcgtagctctctttcagcttcggatctgcatccattcctgcaatctgtctttcatggatgatgtcgaatctttcttttgtaaatgttccgtcttttaccataccgcggatcgcgctctcacgaaatacatgaagacgttctgcatcgttgtactttggaattctgtgcggatagttatctccggacagtgtataggctttcatgccaatctgattaaaatagaaagaaagcagagaagcggtctctgattttcctactccggatccaccgcatacagtcagtacgatcttacggtctgcgtcttcttttttcagttctctgatctgtcctaaaagttctctgaagatcaggtttgctttgttgatgtgatcttcaccaatctcgatcttgtctcctggcatgtcgccctgtgggatcttctccgggatcaccggtgcagtccatgcagaaggattttccacatatttgttcatgtttgcctcctcttgtccgctgccttccgacagccgctgaatcattgcgttttcgtaactgttccataccttcacaggtacggaccaaaatgcatgtaagctcatcttcgatgatatcattttggcttatttgtcagataaaggaattatatcacgacattgtcaaaaacatatcgtaatataatcggtgttattatatgccagatacccgttttccgtcaatatttcttcaaaatatttctccgtgtaatttttatgtaatatttgcttaatatctttatggtaaaatatctcatattttttttagaggaggaaatctatgaaaaagttttatacatggtatcaaaaacatatcacaggtgcaatctttatcggcctgattctcggtattctgaccggactttttctggctggacgatttgaacctgtactgaccatcaccagtcttctgggaagcatctatatgaatgcactgaatatgatgatcttccctctggtcttctgttccatcatcatgggtatcaccagtatcggtaatgcccgtaccaccggaaagatcaccggttattccatgatctttttcctgtgtaccaccggacttgccagtctggcaggactgatcatcccacgtctgatccgccttggaaaaggagttaacttcgagatggcaacttccgatatccaggctaccgagatgaccagcatcctggatactgtaaaaaatctgatcccgtccaatccggtagctgcttttgccaacggaaatatgcttcaggttctggtatttgccgttatcatcggttttaccctgttggcgatcaaagaaaaaggtgaacctctgttacatctgattgattcctgtaacgaggtatgtctgaagatcatcagcaccgtgatgtattttaccccgatcggtgtcttctgtaccatcgtaccggttgtagaagccaacggaaccaagacgatcctgtctctggctacccagctgatcattctgtatgtgactttctacggatttgcactgatcatctatggaggatccgtaaaacttcttggtaagacaaacccggtcaaattcttcaaggccatcatgcctgctgctctgaatgccttcggaacctgttccagttccgcaaccatcccgatcagcaaacagtgtgtggaagaagaactcggtgtctccaacaagatcaccagtatcaccattcctctgggagcaaccgtcaacatggatgcggtatccatcctgatgtcctttatgatcatgttcttcgctaatgcctgcggtattaacgtaagcatcagcatgatgatcatcatcctgttagccaacgttctcctttctgtgggaactccggggatccccggcggagccattgcttctttcgcagctcttgctaccatggcagggcttccggccggcgttatgggtgtctacatcagtatcaacaccctgtgtgacatgggtgcaacctgtgtcaatgtcatcggtgacctggctgcctgtgtggttctgaaggagaaaatcaagttagacgaataaaacaattaattacataagtgcagaaaacgggatacacccggacatcgaaaatgattccaggtgcatcccgtttttattttctcatttttttcagcagattttctccagccctcttacaatctttccgatccgctccatatctaccgaagaataattcattacatacgtgttttcaattcctgccttcttttcataatagaacttggaaagtggtgacagcttgatgccctgggcttttgccagctctattacattctcctcagctttctccgttttcagtttcatcaagaaatgcacaccggcctcttccccggatatttccacacatttgtgcagaccactatcccagattgcagataagaatccatttttcttattttgatagtaattgcgcagcctgttaatatgtttttcgaaatatccttctttgataaacagatccagggtatattgttcaaagtttgataccgtacaggaataaaatgataatttctgataaaactgttccagaagcggacgcggcaggatcatataactgatacgtacagtagaagccagcgtctttgtaaaggtattcatataaataactttttcggaaatatcgatactttgcagtgtggggatcggtttcccgcccagacgcagttcactgtcgtaatcgtcctcgatgatgtacctgccttctccttttgaagcccagccaagaagttcataacggcggctgatcggcatcacaattccggtcggataatgatgggatggagaaatatgtacaatatctacctttttttcttctaactgagaaacttccacaccttcatcatccatatcgatgtatgtccagtttacctgatagttccgatagattttcccgatcttctgatatcccggattttccaccgcatagactgcctcgtgtcccagaagctggatcagcagaccgtacaggtactcggttccggctcctatgatgatctgctccggctgtaccgtcatgcccctgaaatccttcagatagcccgcgatggactgtctgagtgacataattcctccacagggcgggttggtcatcaactgaatccggctgtcgcttaacacctccctgaccatcttcgcccagatggtaaagggaaactgatcggcctcggtctgattgctggtaaaatcagccagatagctgttttctccactggtcatgggaataatctcctgcacttcttctctttgttttgtctccagcacccctttaaagtccgttacatagaatcctcttttgggcatggaataaatatagccctccgcgatcagctgctcataggcattttctacagtgatcacgctgatacccagattttttgcaaaactccgcttagagggaagtttttctcctgcctgcaaagtcccctgtaaaatatcgtttttgatgcatttgtacagatattcatacatggaatctgaccctatatttgtgaaattatatgtcagcattgttcttcttttctcctgtctggccttactgaatatatttattttgataattttttcatatccactttagcattataatctacccatacatttttttcaagagattaacctactacttaaggaggaatattattattatggaaaacagatacgaactgaacaaggaactggcacagatgttaaagggcggtgtcatcatggatgttaccacaccggagcaggcaaagattgcggaagcagcaggtgcctgtgctgtcatggctctggaacggatacctgcagatatccgtgcagccggcggtgtttcccgtatgagtgatccgaagatgattcaggggatccagaatgctgttactatcccggttatggccaaatgccgaatcggtcattttgtggaggctcaggttctcgaagcgatcgagattgactatatcgatgagagtgaagtgctctctcctgcagatgatgtgtaccatatcaataagaaaaactttaaagtaccttttgtatgtggagcaaaggatctgggcgaggcgcttcgccggatcaacgagggtgcttccatgatccgtaccaaaggagaacctggtaccggtgatatcgtgcaggcggtacgtcatatgcgtaaaatgaacagtgcgatcgcacagatcaaaggcatgcgtgaggatgagctttttgagattgcaaagcagttacaggttccttttgatctggttgcttatgtacatgaaaatggaaagcttccggtggttaattttgcagccggaggtgtggctactcctgcagatgcagctttgatgatgcaactgggtgccgagggtgtcttcgtaggatccggtatcttcaaatcaggcaatccggagaagagagcaaatgcgattgtgaaagcggttacgaattatacagatgcgaagatgatcgccagattatctgaggatctcggggaagcgatggtcggtatcaacgaatctgagattcagcttctgatggcagaaaggggaaaataagatgaaaattgcagttcttgccgtacagggagcttttatcgagcacgagcggaaactggaagtgcttggggcttcctgtgtggagcttcgcaaggcggaggatctgaaccagtcttatgacgggctagttcttcccggcggcgaaagtacggtacatgggaagcttttacgggagcttgggatgtttgatacgatccggaagcagattaaggatgggcttccggttttggctacctgtgcggggatgattcttctggcggattcgctggaggggaatgcgatggtgcatcttcagacggttccgatgacggtgaagaggaatgcttatggacggcagttggggagttttcacacggaagcagagtttaaaggaattggggagattcctatgacgtttatccgggcgccttatgtggcggatgtttcggatggagttgaggtactggctgtagtacaggatcggattgtggcggttcggtatgggaagcagatggcgctggcgtttcatccggagctggatgaggatcatcgggtgcatgaagagtttttacggatgtgtggagaaaaataagttcggttgggtttatgacggacgaagcgggagggcggacagcaccgggcagacagccgctggtaacgcaaatctgagctagagcgtgtctgaaaaaggcttttcgtgagctgcgagtctcagtttgtgggagattttatccgaatgagggcggcgtagcgggctacggcaaccgaatgagggtaaaatataccgcaaagtggggcttgcagattgcggaaatgatttttcagacacgctctagtcaccaactccgactatattcgcgagggtcggcggaccctcgcgaaagtctgcgtaggtgccggatctcatctttgctaaaagcaccagcaaaaggctgtctgcccggtgctgtccgccctcccgcttctggctctcgttggattttgcttaaaacagactgtccgcagcgcggcaaaacggttttctccatttggatcaattttcaccatctcggatgaatatccgggcagtggcggtgggttatggcggcacgcatttctacatagcagccgcagatgcggcacataccggagagcaggtggtcgcaggttttgcactgggacaggcgggtttcgtattcctgatccggagttttgtcgtcggggttcaggttggcgatgtattcgtacatggttttgtaggtgtctgcttcgctcatttcacgaagcagacattttttgcagattcttgtgaatgtgtccattgttttttctttctctgttttttatatcgtgtcattttaccggaaaagggcagcctgtataacaggccacccttttggtatcgcagggattgctccgcgattttcacgcggactttatttcagtgcaatgtgcagtacactgcaggccggaatggtgaatttgattccggcgtgtactttttctacgccctcgaaggactggacggttacgttttccgggtcttcgaaggtgtttttggcgtgcatttcctgggttacgatctgggctttgatggattctacttttttgccgaggatcgttgtttcgatcgggtaagcatgttccagatccaggttggtcatggtgatatgcatcacaccgtccgcatctacggatacggactcggacaggtttggtaccatattttcttcttccagtccgacgttttctgtctccagggtgctgtccaggaggtctgcgtcctgatggtatttgtacatatcaaatacatgataggtcggggttttgatcattttgctgccttcggtcaggattacggcctgcaagacgtttatcatctgggcgatgtttgccatttttacgcggtcgctgtgtttattaaagatattcaggttgatacctgctaccagggcatcgcgcatcgtgttctgctgatacagaaagcccgggttggttcccggttctacttcgtaccaggttccccattcatcgacgatcattccgacttcttttttcggatcgtatttatccatgatggcaccgtgacgggtgataagttcgtccatgtaccaggtctttttcatggtctggtaccattttttttcgtcaaattcagtagcacttcctttgtttaaccatccgcccggatgcgtatagtagtgcagagacagcccgtccataaatccgtgctgacccggttcgtttcgacggaaggtggttttcatgacttcctctgtccactcgtaatcgtccacatttgctccgcaggcgatctttttgatcggtttgtttccggcatagttccgcacatatgtctgatatctgcggtacatatttccatagaaatccgggttcatgttaccgccacagccccagttttcatttcccacaccaaagtaatctaccgtccacgcttctttgtgaccgtttttcgttctcaggtctgccatcggggatacgccctcgaaggtcatgtattctacccactcagacatttcctgtacggttccgcttcccatgttgccgttgatataagtctcacagcccagctgacggcacagctcgaagaattcgtgcgttccgaagctgttgtcttctaccacgccgccccagtgggtgttgacgattttctttcttccttctttcggtccgatgccgtctttccagtgatattcgtcagcgaaacatccacccggccagcgaagtaccgggatacggatctgttttaaggcttccaccacatcggtacgcatcccgttgacgttcgggatttcagaattttctcccacatacagtccctcatagatacaccttcccagatgctcggaaaaatgtccctgcagttctttattgatatgggaaagttttcgttctgcattgattactaattttgccatgttgttcctccatatttttatgtataaagtatattttcaaatatccgtttacaaatactctgtttcttccaccttctggtacacaaataccgggaatcctttttcgtcatacgtcactttcatgattctcgcatggcggttcgggtcgtacagtggatctccgatgatctcgtcatacgggcgggcatgatagacacaaagatccgtcacaccatcttctgcctttacaaagcagttgtgccccggtccgtaaatccccttttcttcgtcggttttcagtaccgaatgccgcagtttcgtccatgcatgcggatccagcagatctgcattttcatcgatatacatcattcccatgcagtagcatgctcccgtcgcgcttgcggaaaaagtcagaaaaatctttccgtcatgttttaagatcgccggtccttcatttacccaaaaatccacccgctcccagtcataatccggtgttgtcaacaatacctgatccgtgcagagtttgttggctgctgccatttttccgatatacagattggaaatctggcgaccgacacccgttttttccgcccagatataataccattctccacggtgttcaaacaccgtcgcgtccagagaaaaggcatggaacgaaaattcatcgctgtctgccgcctgcatcatgccaagttcttcccattcatctttcatcggattctgccccttgcaatgcaggacatacggacggatgttccagatgtcatctttatccccggctgcatagtagatataccatccgccaaacagatagtgaatctccggtgcccaaatatggatgctctgcggtccgctttcatgtctcacccagagggttttctcctccgcatgtaccagaccacccagatcgttcgcagcacgcagaataatccggtcataagccggcacggatgcggtaaaatagcaggttccgtccgtgtggcggtacacaaacggatccgcccgctgcgcgatccattcatcgttgtatggcgtgtggatataattgtctttattcatttttatcctctttttctgttaaaatagtttcctttttactgattataagaaataatagacttgttgataatatggcaacaagtccaaatttgccatatgctttttgtatactctgccaaaacttaaaaaccctcagttccgacaggtgcttcttacaccaaccggaaactgaggatcttaagatttgaaccgcttctacgacttacgcgtttttgctgctcagatattcgttaatatttgccagaacaacgtctgcatccagaccatgcaccatgcatgcttcttccagagattctccgatagaagacgggcatcctacgcagtgcataccagcctgcatcaggatcacagcgattccgccatccagttccagcatctcgcccatagtggtttctttcgtaaccttcatgattgggtcctccttcatactgttttcgcgactgtttccaatcacacttactgatacattttatcatacttctctcagaacttccagttttctcggtagatttttctcacagttttccacaggctccaatggattcatccgtgatatccacggaactccgtccccggtggaggaaaactttgtggaaagtctcctattacattcgccggtagcaggtaatttacaacagatacccggacaattggctctgatgcaccggatttgtcagaaaaataacacttacgaaacacaaaagactgcgttataataatcaacgctgtaaaaaaccaagtaagatttgaaagagaaaaaggagtaacaagtatgccgcagaataaaagagaaagtttaatttacaccgtcctgatgtgtttttgcatggtgctctggatgagtatgtataatgtcaccctgcatatgggaggtttttccctggaagtgctaaaagaaggatggctgggcttcccgattgcttacgtatttgccatgtgctgtgactggttcctggtatccggtctggcgaaaaagttcgcatttacctatctggtaaaaccggaagacagtgtactgaaaaaagtcatctgtgtatcctgttccatggtagtaccgatggtactcatcatgtccatgtacggtgctgtggaaggatgtgtgcgctccggtgcatggtcccagctgctgatgatctggctgaccaacatccccaagaactttatcatggctcttcctttccagctgatcgtagccggaccgctggttcgtttcatcttccgttctgcattcccggaaggcaaggtactggcgtgacacagcacaaaatccgggaaagtggtgttaagagataccactttcccggattttttatttacgcgagcaatgcaccaaagtccatgcttgtattagaccttggcgactgccgcgataactcaagaaacttgcaaagcgtgtttctcatagttttttctgctctctcgtctactctgtaattctcccgtagcactttggtctgcggtcacggaacagtccccattccagacgttttgctgccagttcgtccagatcaaatgtctctgtcagtatttcttcctgatcccgggaagctgtctgtaagagttctcctgtttcatccgtgataaaagaggaaccgtaaaaaatcagtgatgattcctgcccgccattttccgcacagggttttacttcctctttgccgatccggttggccgcgatcaccggcatcagattcatcgctgcatgtccctgcatacaacgacgccagtgcggcatactgtcatattcaagaatcggttcggaaccgatcgccgtaggataaaagagcagttctgctccttctaaagccatacaccgtgccgtttccgggaaccactgatcccagcagattcccacaccgatctttccatatctggtgtcaaatacccggaaaccggtgtctcccggtgtaaaatagaatttttcctgataataatgatcatcgggaatatgtgttttccgatataccccgagtagttctccatccgcatcgatgcatgctaccgaattatagagattattgacctctttttcataaaaactgatcggtaaaaccactttcagttccttcgccagcttccgtccccagcacaccgcttcattttcttccacaggcttcgcatagctgtaaaaatcatatctcctctgctggcagaaatattctctctcgaaaagttccgagagcaaaatgatctgtgcaccggcggctgctgcctgacgtaccattttttctgcttttttaaggttttcctgcggatgattggtacactgcatctgcactgctgccaccgtcacctgtctttttcccatcttctctttcctcctgtcaccccggtacttttgtccttttcatgggacttttaccagctcttctcaccgcttctgttcgtttcgtcttttccctgccggaatctgctgcgtaatacagtggatatttcctccccctgtcaggatatctctggcatataccgggataatctcacgatccggacaaagttttcccagaatctgtgctgctctccggtcgctttcttcattttccccgccaaatgccggcagtactacagcaccgttggaaaaatagaagtttacataagaagcggccagacgttctccctcttcccgcacatcctctccgtcttcaaatacatatccttccagttcctccccggtcacgcagaccgggtgatccgggatcggaagtttatgcacggtgatttttcttccctttgcatctgtctctccttccagatatcccagacacgccatggataacggatactgaggatcttccctgttgtctgtccaggcaagaatcacctcacccggttttaagaatgcacagacattgtccacatgctcgttggtctcatccatatagattccccggggcagccacagcactttttcggcccccagataggctttcagtttttctgtaatctcctctttggtaagatccggatttctgcccttactgagcagacaggattcggtcaccatcacggttccctctccatcgctgtggacagaaccgccttccaacacaaacggccttgcgtcataccaggtgtatccctctttctcgcaaaagaagggagcaaaacgattgtctttttcccatgaagcgtacagtccgtcttcggttccgccccaggcgttaaactcccagttgattccccttacttcctgtccatccgtcacaaaggttggtcccacatctctggcccaggcatcgtcggtctctgccgtaaaaacccttatcggatacaatgcttcatctgtctgcagacgctgtgccagcttttccgcctctgaaaatgtcttcccacttgccgcaagataaacttcttcactttttgcaattgcccggattacgtctgcaaatgctttttttgcctcccgtgcaccatttcgccaggatcccggccgttccggccaaatcagaatacagccccggtgcggctcatattctcctggcatacggtacccgtcctgcaccggcagaatctttcttatttctacatgatttattgtcttttttccgctgtccatgtcttcctgtctcctgtttttctcctggtgtttctgcaaatatcaaatactctctgaagaatctaatgatctctcaggatattctgtgatgttacgacagtctctctttaaaatcctcgtacccgaatgtctttatcatctccaccgttccatcttccttcaacaaagcgattcccggaagcggcataccgttaaaggtattatttttcaccatagaataaatcgccatatcttcaaagaccagacgatctccgatcgctaccggatgttcaaaactgtaatccccaatcacatccccggcaagacaggtcatgctggataaccgatacgtatatgttttttctcccggttcgtacccaccccgcagaggcggacgatagggcatttccagtacatccggcatatgacaggccgcggacgcatccaaaatcaggatctccattccatttttcacgatatcctgcacttctgtcaccagatatccggcatttaaagctatagcctccccgggttccagatatacttctacctgataggttgcccgaatataggcgatcagctgttttaactgtttcagctgataacccggtcttgtgatatgatggcctcctcccagattcagccatttcatctttttcagatacttaccaaacttttcttcaaaagcccgaaacgtaatcaccagatcatcggcatcctgctcacagagcgtatgaaaatgaagcccttccacaccttccagcagatcttcccgaaactctgccttcgtcacaccaagccgtgatcccggtccgcatggatcataaatctcatgaccttcctgtgtggaacattccggattcacccggattcccacgctgaccggttttccatcttcccggatctgtgcgctttgtttacataactctttatatttttcatactgtcggaaggaattgaacacgatatgatcacagattttcaccagttctttcatatcggcttccttatacgccggcgcaaacacatgattttcttttcccatctcttccctgccaaggcgggcttcataaagcccgctggccgtggttccgctgataaaggttccaatcatcgggtacagagaaaacatggaaaacgccttctgtgccagcaacacatgacagcccgtgtccttctccagtttctgaagaatcctgagattttcttttaactttttctcatctgccacgtaacagggagttggcagatctttccacatcattctacaatctgtggatcttcatccacaacccacggcaggccatactgattcagcatatccataaacggatccggatcaaattcttcgatattgaagacaccgtctttatcccatactttatccacaaccagcgccgcaccgatcattgcaggaacacctgtcgtataagagattgcctgggagccaacttctttgtagcattcctgatgatcacacacattataaatataaatcgtcttttcttttccgtctttctttccggtgaagatacagccgatattcgtctttcccacagtacgcggaccaagagatgccggatccgggagcagtgctttcagaaactgaatcggaacgatttctcttccttcataattgatgggagaagtggaaagcattcctacattttccagacatttcatatgtgtcaggtaactctgtccgaatgtcataaagaaacggattctttttacaccaggtacattcttcgccagagattcgatctcctcatggtgaagcagatacatatctttttctcctacctgcgggaaattatattctctcttgatctccatcggttctgtctctacccagtgaccgttctcccagtaggaaccattggcagatacttcacgaaggttgatctccggattaaagttggttgcaaatggatatccgtggtctccgccattgcagtccaggatatcaatggtgtcgatctgatcaaaataatgtttcattgcatatgcggtaaatacgctggttacgcccggatcaaatccgcttcccaagagagctgtaatccccgcttctttgaatctttcacgatacgcccactgccaggaataatcaaaatatgcagtaaatccagcttctttgcatcgtttttcatagatggctctccactccggatcatcggtatcttccggttcgtaattcgcggtatcgatataatccaccttacactccaggcaagcctccatgatcgtcagatcctgatacggcagcgccacattcagaaccgcatccggctgatacgaccggatcagtgctaccagttcttctaccttatccgcatccacctgtgccgttgtgatcttcgtatctgtggtaccttccagtttttcctttaacgcatcacattttgcttttgttctgctggcgatgcagatctctgaaaacgtcttgctgttctgacagcacttatgaatcgctactcctgctacgcctccgcatccgataatcagtaatcttcccattcttttttcctcctgttttctatttttcttacttttcttcttcttccagcatatcttccacatacttcggaagcataaaggctcccttatgaagattggtggtataataccaggtcttaattttccgttctttccatcgttttacattcagatcatccaggggatgatattttttggaagcaaatccaaacagccagtatccggaagagcaggttggtatatgtgcctgatacactctgctgacgggaaagctgtgactggccttcctgtgcatgacccggcaggattcttcgtcctcatcataaaacggactgccatgctgataaaccatgatcccgtcttcctttagcgcccggtaacagtttccgtagaattctttggtaaataatcctgcattatgtcccagtggatcgattgcgtcattaatgatcagatcgtacatattttgtttgcttcgcagaaatcgcaatccgtcttcataatagaccgttacccgtggatctgacagtccgcaggcattatccggaaagtattctttacagacttccacaaacacccgatccggttccaccacatcaatggtctcaatctctttgtaatgtcccagttctcttgccacgccgccgtctcctccaccgatcaccagcacatgcttcacattgggatgaacagccatcggaatatgtacgaccatttcatcgtagataaattcatccttctctgaaaatacaatgcttccgtctgcacttaaaaaacggccaaattcatccgaatcaaatacatcgatccgctgaaattccgtctgcagcccgaacagctgcttttgtacctttacagaaacttttactttttctgtatggtaatccgaaaaccataattccattcttttctcccctcccttatcttcttaccgcaccggtcggagcttccatcacatacagatattccaccgccggatcctgcgttccctgcatggaacagcccttttctttcgcatatataatgtagtcaataatttcttttgtgatcatctctcccggggccagaatcggaatccccggtggataacacatggcaaattcaccacagatcatcccttctgtctcccggatcggcactgcctttttctccgcataaaatgccgtctgcggagataccataacggtcgggttaatatattcggtattcggcatctgctccggatctctggcgtacagcctctggatatccgaaagagcccctaccaggcgttcaatatcctgaatccggtcaccaatggaaatatacgccagaatattggcaatgtctcccagttcaatctggatatcatattcatcccgcaaaagatcatacacttcgatacccgcaagaccgatatctctggtatagacagacagtttagtcacatcaaaatcgtatacactgctcccattgatcatgtcttttccatacgcatagaatccaccgatggcattgatctcttcccttgcatactctgccatccggctcacttttgcaaaggattcttttcccctgagagccagatttcttctggaaatatccagactggacatcagaaggtaagatgcactggtggtctgggtcagattgataatctgactcacatattcccagttcacattttttcccgtcagcaacagggaactctgggtcaagcttcccccggacttatgcatggaaaccgatgccatatccgctcctgcgtccatggcacagaccggaaggttctcaccaaaatacagatgggttccgtgggcttcatccaccagaaccagcatattgtgtgcatgagcaatctttacaatggatcgaagatccgaacagattccataataagtaggattgttcaccagcaccgccacggcatccggattcgcaacaatcgctttttccacttcggacacttccattcccagggaaattccgagacggttatccacctccgggtttacataaaccggtatcgctccacacaataccagggcattgatcacactcttgtgtacatttcttggaaggatgatcttatcccccgccttgcagcaggaaagtaccattccctgtaccgaagaggtagttcctcctaccatgaaaaacgcatggtccgcacggaatgcttccgccgccagctcctctgcctctttgatcaccgataccggatggcagagattgtccagcggtttcatggaattcacatccagactgacacatttttcacccagaagttccaccagctccggatttccccgccctctcttatgcccgggcacatcgaagggaacgacccttcgtttcttcagtttttccagcgcctcatagaccggcgcatgcatctgttttttcttatccatatcttctccctgttgtcttttcctgtccacagatcaaatattgtttatatgtgactgtgaaagtactgacccgttatatttatataacgagataaaatacgcttcgcgaattttactcgttatcgcgacagtcgccaagatcgcatgcaggcatggactttgcctcgttgttcgcgtaaatcaaaattgatccaccggaccaattattgataggtaatgcaacaaaaaaggacaggtgatttcacctgtccgcattgtcattctatagttctactttgtattttctctacatccgcaaaaactatgttctcagagtttgtcgttggcatctttgccagcaaatatttgctattccgtaactgtatctgcccacagccacaagctaactactctttattgaccatttcacaaatgatacctcaaccggatttcttcgctttcttccggttggaaacttataaaatttagcttttaactaaatcaataatgcggtctctcaccgctctcggcagctgccccgcctgtccgtatgggcttaaccaatatgcttggtgggctaataataaatatttgcatgaaaacatggtttgcttcatgtagttttgagtatatcacagcattttatgtaatgcaagtaaaagctgagtaaagtcattcaaagtactctcccggttttctttttttgttgctcccggtaatacctctgatctccctgcagtgtttttaaacgtcgcgaaggaccaaaacaaattaccaaattccaacgtccctggaatctgatagtctgtcttatccagcagcagacacatacgctctatcctggtattattcagatattgccgtggcagataaaaaagcacttttatatttcttagtttttcttggttttccgggctttgtaagcctttgtgaatttttgctttctggcatgacctggtttattttcacataatatcgtccgcaaaactgttctcaccgattgtcaaccttctccgggaacatatcatgattactcatgcggttccgggcaaccttttcccaatccgtacccggctttccgtaattacaatacggatcaatggacaatcctcctcttgggagaaatttaccccagacttctatatatttcggttcaagaagactgaccagatctttcatgattatgttgatcacatcttcatgaaagtctccatgatttctaaacgagaacaaatataatttcaaagatttactctccacaagacgttcatccggaacataagaaattgtgatcgttgcaaagtccggctgtccggtaatcggacaaaggcttgtaaattcggggcagttaaacttgacaaaataatcattttcaggatgtttattctgaaatgcctctaatacagatggattgtaatccatactgtactccgtttgctgatttcccaataatgttaaattttctttttctctcatcgtttcctcctctatctcaatgccggatcttccatatggtttgcctgaaatgccgctgcacggtcaatgcatgttccgcattttccgcaaggcttctcgcctccttcgtagcaggaccaggtcaactcgtaaggaactcccagttctaatccaatccttactacttcagctttggatacattaacaaaaggtgcttctattttaagctgatgtccggaaccttcccatattgcttcattcatagcctgattgaataccggcgagcagtccggatacgcaaagcctgcagaatcatctgcatgagctccataataaattacttcgcagtccttgctcagtgcaatacttgccgcagaagaaaggaataatccatttctgaacggtacatatgtgcttaccggcttatctccatttgtttttgaaatctgttctgcgtaactttcctccgggatgtcttctgtagactgttgaagcagtgaacagttactatattgaaatatcttactcaaatccaggaacaaatgctccacaccataatattgggcaactgctattgcagctttaatttctttatcatgtttttgtccgtaggaaaccgaaagggcaatcacctggtctttcccatacttttggattgccagtcccaatgccgttgttgagtcgattcctccgctaaaaagaactaatgctttcatctctatcacctcactatttatactccccgcttgtcaggatcccagatcactttatgtatctgtatctgcaaccgtacaccattcaaccgatgcttcaacatgaattctactatttgtaccggttctattgagccaaaaacagggctaagataaacatgacatctgttggtcagatcataagtccgaatcaattccagtgctttcagcaaatcttcctgactgccggatacaaattttacagtatcattcttttcaagcagttccatgttctctgttatcatatggtcttcgcacccgcttgacggtaacttatagtccattgtaaataccggacgttcttcacaaaatgcagccagatcgactgctccatttgtctcaatctcaacctgcagtcctgcttgtaaaagaagatggatgagatccctgatatctttttgcaacagcggttctccgcctgtaagtgtcacattgtgaattcctgttccaagaacataatttagtatttcttccggagtttcttctttatatgggcactcaggttcattagcccacatagtatcacaataactacatcgcaggttgcactctttaaaacggataaaaactgcaagttctcctgcacgcgtgccttccccattaatactggtaaatttttctactactttcatctactcttcctcatagactgcacaattattaggtgtctcatacacttccacataatgaactccataccctaaatctgttaattctttgtagaaataatatgcgaaattttctgctgtaggacgaaatgaaacttcctccaaatgaaaatcttcattctgaagtgcagctacggtctctgctttcagagatcccgtctcgtagatcaggctatggtcaaagtaatcacaaagtgccttcaggtcttttttcagattaccaaaatccactaccattcctcgtgtctgtccttcttgttctaactcctgactcttgatttttgcaacaacattccaacgatgtccgtggatgtttctacattttccctcgtatttccaaagaaaatgtgctgcatcaaaactggcttttgtttgtaaataatacatatttcaactctcctgtatgtgaaatgtatgtacctgttaagagctatgcattctaaatagagcagtttttatatatcagaaaatccatatctaatatacaaaaagctctgcgtacttcttcgcacgcagagcctgaaatcctcatgattagcccaggttttatttttcgacaggaaggtacaaatgaactgtcggctgttttcacagcatgaaaattataccacagaaagtcagattgtcaaattgatttatgatattatgatactgactgcccgatccatgcttcttaagagcaactgtcctaaaaagatccccatgccaaatcatgaattcccttttatcccagtattcctatcccccggatatattatctatatttacatataatatctacacaaaattttatggattattttcgggttattttcaaccctctatgcctttcagacattgattttaccggttcgacgcaggcgatgatatatttcaggtattttcgttccgcattcggatcgatgacattcacaatactgaggctgtaaagatccgaactaagctgcagtgcctgctctttcagataatttcggatcttctggtaagcgatccggatatctccgtctttctcccggcagaccatcacaaccgtaagtctgccagaaagctcgcggatgcccgggccggatgcctgtgcgtccgcaaagctgaaaacttccctatacacatactgttctttctggaaatcttcccgtccgatcgacgctcccataggaaaggcctgtattccgggatgagcacattctttcagatgtctgtgaatgtctgtggaaatctcgctgaaagaagtcgccggatctgagagtacttttgttacctttaatcgaaaaatctccggctgctcatacagttctggctttcctgtatcattcttccggatctgttccagcagttttcttgtatttccgataattccgatccgccgctccagctctctttgctgcatcaaaagcgccgcgtactgccggtcaacaaaaccgtcaaaacgcacttcttccccgccaagcagatattcttttatatcctccaccgaacatcccagtccacgaaaggtactgataaaataataggagctgatctgcgcatagctgtaatagtgatacccgtttttctcacttttcttcggcaccaggatcccctgtttttcataataacgcagcgtgtctctcgtcgtctgacacatcctggcaaatgctcccgcgctgatacaatattcctctcccgccatgtttttcctcctgttttttccgacatttctatgttgtaatccggttccggatttgtattgttacagttttcttctttttctgtatgttccccgttcctgctgttattcgctgtcttttgtaacatttgcattcttgacatgggggttacacccagctttattctatcacaggataaaaatacacaacaccctgatttcaggggattttataataatggagttgaaatatcatgcatacattaaagaaactttactgtcgttgttttcagatcagttttcgcgctgccctgccgctgatgccgtaccgggaaccaaagctgatcgatggattttccggtgttccgaaagttttgcggaaacataacattaccaggcttcttcttgtcacggatccgggtgtgtattctcttggattgactacaccgctggaacagattttgaaaaaagccgggatcacctgtatcgtctacaaagatacggtggccaatcctacatctgccaacgtggaagatgccaaaaacctgtatctgaaaaaacactgtcaggcgcttctcgctttcggcggcggctcttccatggactgtgccaaaggagtcggtgccagactcgcccgtccgaacaaatcactggccaagatggaaggaatccttcatgtcatgcacaagctgcccctgctgatcgccatccccactacagccggaaccggaagtgaaacaacactggccgctgtcatcaccgatgccgatacccatcacaaatacgcgatcaacgatttcagcctgatcccgcactacgccgttctggagcctgaagtcacagtcggactgccagcgcaactcaccgccactaccggtatggatgccctgacacatgcgattgaagcatatatcggccgctccaccacgaagcagacccgaaaagccgcgatcgaagcgatccagctgatcttccagtatctcccggtcgcctataaaaatggcaaaaaccggacagcaagaaaagaaatgctccgcgcctcctatctggccggtactgcatttaccaaaagttatgtcggatatgtacatgccgtagcacacagtctgggcggtcagtacggcatcccgcatggactggcaaactccgttcttcttccgatcgttctcgaagcgtacggaagcgccgcgcacaaaaaactggctcacctcgcccgaatcaccaaactttcttcttccccagacgataccaccgcagccaatgcttttatcgcacatatccgaaaaatgaacgcttccatgaacatcccgacgaccctcgccggtatccgtaacgaagatatcccgaaactggcccgctatgccgataaagaggcgaatccgctttatccagttccgattctttgggatgacaaacagcttgctttgatgtatcatctggtacaggagaaaaaagaaaaggagaataacagccatgcagaaacaggacatcgagactatactggcatctcagcgtaagttcttcgccaccggaaagactctgccggtctcctggcgtctcgaacaactgaaaaaattaagaacttctatgcttcgccacgaagaggatctgtacggagcattgaaaaaagatctgggaaaaagccggatggaaagttatatgtgtgagatcggactgaccctttctgaactgacctggatggaaaagcatatccgcaggctgacccgtgaaaaacgggttccaaccccactggcacagttcgctgcaagaagttttcagtccccgacaccgtacggcacggttctgatcatgagtccatggaattatccggtactcctgacactggaacctctgattgacgcactggtcgccggcaataccgtcatcgtcaaaccaagtgcctacgcaccagctacaagtgctgtgatggaaatgattataagagagacttaccctccggaatatgtctgtatgatcactggcggccatcaggaaaaccaggccctgcttacacagcgttttgataaaatcttttttaccggcggcaaaaccgtaggccgtgaagtgctccgccacgccgcagagtatctgactccggttaccctcgaactcggcggaaaaagcccgtgtatcgtggattccaccgcaaagattccattagctgccagacgtatcgtctttggaaaatacttaaattgcggacagacctgtgtagccccggattatatcctctgtgatgtttccatcaaagatgccttgcttgcagcaattcagaaagaaattaccagacagtttggagatcgtccgttggacaatccggattacggaaaaattatcaaccaaaaacattttgaacggatccttggtctgatcgcaaaagaaaaaataatctgtggtggtgaatcagatccttctactcttcgcatcgcaccaaccgtcctcaccgatgtttcctgggacgatccggtcatgggggaagagatcttcggaccgattcttccggtgctgacatattcctctctggatgaggcgatccgcaccgtagaatctcacccccatccactggcattatatttcttcagcgaagacaaaaaagcgcagaaaaaagtactggatctgtgtcacttcggcggcggctgcatcaacgacaccatcatccatcttgctaccagcgccatgccatttggcggtgtcggtgagagcggaatggggggataccacggcgtggaaggcttcaaaaccttcagtcacacccgcagcattgtcgacaagaaaacctggatggatcttccgatccggtatcaggagtatgtgggatggaaagaaaaacttttgcggatgtttctgcgatagttttcttatttttgcacttccaaaattgaaatccgtaaaatatcaaaaggtggtatgttcattgtcacgtcaaacaattgaacacaccaccttttatttacacaagcagcacgctagagcgtgtctgaaaaaggcttttcgtgagctgcaaaaaacctgcaggatacattcatttgtatcttacaggtctattctatctcattcctcccggagctttccctgcccttcctggcataaaaaagctcccccagttggactcgaaccaacgacactgcggttaacagccgcatgctctaccgactgagctatggaggatcattctctttctctcttttctctccatgtaccttcaaaactgcacacacgtaacatccttcttcctactgctttgcgatcgaccgttccaggtcaaaccctcgaccgattagtaacagtcagctccatacattactgcacttccacctctgccctatctacctcgtcgtcttcaaggggtcttacttctttcgaatgggatatctcatcttgaggggggcttcacgcttagatgccttcagcgtttatcccttccggacttggctaccctgccatgcagctggcactgcaacaggtacaccagcggtccgtccatcccggtcctctcgtactaaggacagctcctctcagatatcctacgcccacgccggatagggaccgaactgtctcacgacgttctgaacccagctcgcgtaccgctttaatgggcgaacagcccaacccttgggacctactacagccccaggatgcgatgagccgacatcgaggtgccaaaccactccgtcgatgtgaactcttgggagtgataagcctgttatccccagggtagcttttatccgttgagcgatggcattcccacttaataccaccggatcactaagtcctactttcgtacctgctccacccgtcggtgtcgcagtcaagctcccttctgcctttgcactcttcgaatggtttccaaccattctgagggaacctttgagcgcctccgataccctttcggaggcgaccgccccagtcaaactccccacctgacattgtcccccagccgggtcacggctgctggttagaaacccagtactgcaagggtggtatcccaacaacggctcctcggcaactggcgttaccgattcatagcctcccacctatcctgtacatgcaataccgaatcccagtatcaagctggagtaaagctccatggggtctttccgtcctggcgcaggtaaccagcatcttcactggtacttcaatttcaccggatgcattgtcgagacagcgctcaaatcattacgcctttcgtgcgggtcggaacttacccgacaaggaatttcgctaccttaggaccgttatagttacggccgccgtttactggggcttcaattcaaagcttcgcttgcgctaacctctcctcttaaccttccagcaccgggcaggcgtcagcccatatacctcacctttcggttttgcatagacctgtgtttttgctaaacagttgcttgagcctattctctgcggccacatttctgtggcaccccttctcccgaagttacggggtcattttgccgagttccttaacaatgcttcttccgtcggccttaggattctctcctcatccacctgtgtcggtttacggtacgggtacaataagaacaatagcggcttttcttgacgcatggctcacatacttccctactagatttcggtccgcatcacgccttcggattgccctgcggtttttcctacaggactcctacctcgcttgcacgcggctttccattccgcgcctatgctctccacacgtgtccccacagttctgtcttactgcagtacaggaatctcaacctgttgtccatcggctacgactctcgtcctcgccttaggccccgacttacccagggcagatcagctttaccctggaaaccttagatattcggccgagaggattcccacctctctctcgctactcattccggcattctctcttcgatacactccacagctccttccggtactgcttcgttgcgtatccaatgctcctctaccaatgtcttcagacattcctcagcttcggtgtcgtgtttcagccccggacattttcggcgcaggacctctcgaccagtgagctattacgcactctttgaatgtatggctgcttctgagccaacatcctggttgtcttcgaaatcccacatccttttccacttaacacgtactttgggaccttagctggaggtctgggctctttcccttttgactatccaacttatctcgtatagtctgactcccgataagcatctacacggcattcggagtttgatattcttcggtaagctttgacgccccctaggaaattcagtgctctacctccgcaagactctatcgaggctagccctaaagctatttcgaggagaaccagctatctccgggttcgattggaatttctcccctatccacacctcatccccacccttttcaacggatgtgggttcggtcctccattgccttttacggcaacttcaacctggacatggatagatcacccggtttcgggtctactctgactgacttttccgccctcttaagacttggtttcccttcggctccacggctctaccgtttaacctcgccagccagcgtaactcgccggaccgttctacaaaaagtacgcggtcgcactcataaggtgcttccacagcttgtaaacacagggtttcaggttctctttcactcccctcccggggtccttttcacctttccttcacagtactatgcgctatcggtcactaaggagtatttagccttggggggtggtccccccgacttcccacaaggttccacgtgtctcgtggtactctggatcctgccgtcccggtccggatttcgtgtacggggctttcaccctctctggctggctttcccaaaaccattccactatcctttctggtaacttatgcagtccataaccccagcatgcacgcacgctggtttaggctcctcccatttcgctcgccgctactctgggaatcgagttttctttcttttcctccggctacttagatgtttcagttcaccgggttcccttccatacgttatggattggcgtatggatacctggagtttatccaggtgggtttccccattcggatacctgcggatcaatggatatttgctcctccccgcagcttttcgcagcttatcacgtccttcatcggctcttagtgccaaggcatccaccctgcgctctttcttgtttgaccttccagttttactagcgtttaaaactggcggttctctcgcagtttcatttcatcgtgtttacaatgtaatgagtagttattgttttgattcgttatccttaaaagataactcctcggatgtctctttttcctatctctaaacgtttaacgtttttggattgtttttcgtatatgcagttttcaaggtacatgcttgctccgcttgtgcgaagctctcgactgatgctttatcagtcatcaggaaactgaacttttgttcaatcctctgatcactggtaaaaccagtttttaatggatccggcatccacctactctcccacaccgtctccagtgcagtaccatcggccgctcaggtcttaaccgtcgtgttcgggatgggaacgggtgtgtcccctgagcgcatcgacgccggaaatttgctacctcttcggtaactcaacagtaaaacacattcatctactttgtcttcccttagaaaggaggtgatccagccgcaccttccgatacggctaccttgttacgacttcaccccagttatcggtcccaccttcgacggctccttcctttcggttaggtcaccggcttcgggtgttactgactcccatggtgtgacgggcggtgtgtacaagacccgggaacgtattcaccgcagtatgctgacctgcgattactagcgattccagcttcatgtagtcgagttgcagactacaatccgaactgagacgttatttttgagatttgctcacactcgcgtgatcgcttccctttgtttacgccattgtagcacgtgtgtagcccaaatcataaggggcatgatgatttgacgtcatccccaccttcctccaggttatccctggcagtctccacagagtgcccaacttcacttgctggctactgaggataagggttgcgctcgttgcgggacttaacccaacatctcacgacacgagctgacgacaaccatgcaccacctgtcttctctgtccccgaagggaaaggactcattacagtccggtcagatcgatgtcaagatttggtaaggttcttcgcgttgcttcgaattaaaccacatgctccaccgcttgtgcgggtccccgtcaattcctttgagtttcattcttgcgaacgtactccccaggtggaatacttattgcgtttgctgcggcaccgaagagctttgctccccaacacctagtattcatcgtttacggcgtggactaccagggtatctaatcctgtttgctccccacgctttcgagcctcaacgtcagttaccgtccagtaagccgccttcgccactggtgttcctcctaatatctacgcatttcaccgctacactaggaattccacttacccctccggtactctagattgacagtttccaatgcagtcccggggttgagccccggcctttcacatcagacttgccattccgtctacgctccctttacacccagtaaatccggataacgcttgccccctacgtattaccgcggctgctggcacgtagttagccggggcttcttagtcaggtaccgtcattttcttccctgctgatagagctttacataccgaaatacttcttcgctcacgcggcgtcgctgcatcagggtttcccccattgtgcaatattccccactgctgcctcccgtaggagtctgggccgtgtctcagtcccaatgtggccgtccaccctctcaggccggctatggatcgtcgccttggtaggccgttaccctgccaactagctaatccaacgcgggtccatctcataccaccggagtttttcacactgtaccatgcagtaccgtgcgcttatgcggtattagcagccatttctaactgttatccccctgtatgaggcaggttacccacgcgttactcacccgtccgccactcagtcactaaggacttcatccgaagaatctgtccaaggtgcttcgttcgacttgcatgtgttaagcacgccgccagcgttcatcctgagccaggatcaaactctctaaataaatgtttgctccaggtcaaaatcaattcttggctaatttatcccttttactgttttttaaggatctttcgatcgttcgtttttatgattttaaaaagaactttcgaggaatgtgtttcactgttcagttatcaaagatcggttttgcattgccgtttgtctcaaacagctttgctattatatcatgttgtttcctgcctgtcaagaacttttttcaacttttttgaagttgtttttgtttctctctcgcagcaactttaatatcttatcacatccgatcagctgttgtcaagaacttttttcatttctttttgacagctttgtgatctctgtgagatctctcagacgcaactccgataggataccaccgtatacatagtttgtcaacagttattttcatatttttttatttttttgcgaataaccgaaatattagatttttcatgtcttttattcctgttccccttcgttcgcctcttccagtgtgacctccgcttccggctgtccctgatcttccacataatcgaagcacaggaccgcctgcggccaattcaggctgatgcgggcgcttttctgtttttcttttccggctttccggatcagttccagaagttccccgagaatctcccgtgtgagataaccaccacgccagtgaaaagtaaacactcgacctttttttgcagtctgtaatgctcgcttatacacatcctcctgcttcgtgaaggacagtttcttttccctataatagaagtgatccccatccgtacagtgtggagccggtgcgatcagcggttcgtgatcccggaagatatttttgtcatccagattgaagtagtcgtaacggatgccattgtgactcagggaattgtcaaaggtgacatccatgtgataatatttgccacccagttttacgatattccaggtatggcggtatttgatccctttttccgggttgttgccgcagataacgatcatgcaccagagtcccagggcatcgcacagtactttgactgccttggcaatcccctcgcagacacccacaccctgtcccagcggtccgataatctcatgggaataggctttctttaatttgtcataccggacattctcgcagatgaagtcgtggacaaatttttctttttcccactcggacttatcctttaccggacgcaccagcttttctactctcgcctgcatggcgcgctggtgttcttttactttatttttttcaaacaggtattccggcacaaagatcaggttcggagaatcctgataatatttgtaacgaaatccggtggcccaaaagatctccgggtgatccagacggagctggaaaaatacgttgtagagttcttccggctccagccgcggaatcagaatctcgtccgccatgttctggaatccctgaaagatgttatgataggcagactgttgtgttttattcatatggttataataatatgcttcgatgacagttctcctttgtatttcttcttttcacaaatacgggggtaaaatccgtttctgcgatttttattttgtttcctattctctatattcttcaatcatactttccttatacgttatactacaacagtcactgccaacagcacaattgcaaagactatattccataccgtaaaatatcgaaaatattgcccttttgtaccagctgtttcattcttttcactttcctgtacataaaatttataagagatcagacttgccagggaagcgatcagggttcccagacctccaatattcactccccggagaagcataggatagtctgtagtaaaaccggaaagtaaaatagccgccggaacattgctgatgacctggctggcagcaaaaccaagaataagttcatgtccttccagtacttttatcagcagttcttttacgattggaatccgccccatatttccgataaatacaaaaaatgcaacaaaagtaagaagcagactataatctactctcagcggtaaaaattcttcttttccacttccgaaaaggaacagacaaatcagaagtgtaattcccagaagcaccggccaggacagcacacgtaaaaccgttgccagacttacgcaaaaaaggaagagcaaaatcagattttcagctgttttattctttggggtttttctcctgatctgttctatctgcatactttcattcttctgtaccagacagctcccgatcagaagaagcaaagataccagcgacaaaggtcccatgacctttacaaaggacagagcagacattccggagacggaatacaaatacagattctgcggattgcccaccggagttgccatacttccaagattggcagctatcgtctccatggtaatcaccggaatcatccgctgattcagttttgccatacgcagcaccagaatcgtaaacggcacaaaagtcagaagtgccacatcattggtaatccacatggagcagaaaaaacaaagccccaccagaaccagcatcaactgccggaaagtgtgtacctttttcagcagtgtattcgccatctgttcaaataaaccggtcttcttaaatccctccatgatcgtcatcagacaaaacaataaagccagtactctggtatcaatatatcctgcataagctcgatccggtctgacaaaaaacatagaaataacagcaagaaaaaccgcgatacaaagcacggtttctctttttaaatatagaattactctcttcatcttcttataccagtgtcagaacccggctcgtcagggatatgaccagaataatcaccgcgataattcccacgatccggaagatttttgtctgtcgtaccgactgatacttcatgccgtttgcaaatccttttgggttgatcgccatgaaaagggcaatggcaaggcagatcgtatcaaaaataatacctatccaaaattccatatatgttctcctttatgttttctgtgttccagtataccgcaattttctggaaaagagaatccttttatccgatccccgcaatcgccgtcagcagcttcagcactcctgccaacgccattacaagtaccgggttccattttgttttccgaagaaggatcaggcagatcacaaagattcccaccatcacccagcgggtgtccgccagtgcgatgacatccaccccgttccagaaggcagataccagaatcgatacgcccgcagacgcgatcatcgccacaaccgccggtcgcagagactgtaagacactctgcaacagatccattttctgatatttcaggtacagccaggcaagcagtgttaccagaatacacgatggcaggatgcatccgaacgtggaaaccactgctcccgggattccggcaatcttggttccgacaaaagttgcggaattgatcgcgatgggacccggtgtcatctgagaaatggtgatcagattggtgaattctcccatgtccagccatccgtgacggctcaccacctgttcccgaattaacggcatcgcggcataaccgcctccgaagctgaacatgccgatctgaaggaaactgaaaaataactgaagataaatcatttcttccgtcccccccttcctgccagtaccgtgcggatcactcccatcgcgatacagatcagcacgatatacaccaccggaacttccatcacataagaagcgataaaagcagctgccatgatcacaatcgatgtccactcttttttcttcgtgatccccgctgccatatcccataccacggaagcaatcactgctcccacacccgcctgcatcccgtccagcagctgactgatgataaaattatcgcaaaacatctgataaaaaacagagatcacagagatgataagaaaaggtggcagaactgttccgaaaattgctgtcagtacccctgcaagaccggccagtttatagccaaccacaattgctccatttaccgcgatcgccccaggtgccgactgtgcaatagcaatcagatccaacatctcattttcttcgatccaatggtacttatccacgaacttatccttcatcagcgtaacgatcacatacccgccaccaaaagtaaaggcactcagatataacgtggacaaaaataatttccaaagcaccttttgttttttcctcacattcttcctcctgattttcatctgttttatcttttcagcaacatacgcttttattatatcagtttctttttttctttacaatcacttctacagttcaccagaacaaagaacgtgttctgacacattcgcatgaaacatttttcatttacagaaaagcctttttgacgtagaaaagggtgcatcgatttttacaaaaatcgatgcacccacctctaatgatccgacagcatttttctgcctttatcttttgatgttaaatgcttcttttcccggaaatactgctgcttcgcccagttcttcctcgattcttaacagctgattgtattttgccacacgttcgcttcggctcggtgcaccggtcttgatctggcaggtgttcagtgctactgcaagatctgcgatcgtggtgtcttctgtttcaccggaacggtgagaggaaatggcagtatatcctgctttgtgtgccatcttgatagcttccagtgtctcggatacagaaccgatctggttcagcttgatcagaatggagtttgcacagccaaggctgattccttttgccagacgttcggtgttggttacaaacaggtcatcgccgaccagctgtaccgtatctcccagctctttggtcatcatctgccatccttcccagtcttcctcatccagaccgtcttcaatggagtagatcggatatttgctgcacagttctttccagtgtgctaccagttcttcggatgtaaatttctttccgcattttggcagaacgtattcgcccttcttgctgcctttccactcgctggatgtagcatccatagccagtacaaagtctttgccaggttcatagccggctctcttcacagcttccagtatacactcgatggcttcttcatcgctgccaagatccggtgcaaatccaccttcgtcacctacggaagtagccagacctttctcttttaacagagctgccagtgcgtggaagacttccgtacaccaacgcagaccttctttgaagcttgctgcgcctgcaggcatgatcatgaattcctgtacatctacagtgttggctgcatgtgcaccaccattcaagatgttcatcatcggcagtggcagccgattgccgttcgcaccgcccaggaaacgatacagcggcagatccagtgcgtttgctgctgctcttgcacttgcgatcgatactgccaggattgcgtttgcacccagattggatttgtctttggttccgtctgctttgatcatagctgcgtctaccgcatagatatccagtgcattcacaccctttaatgcctcattaattactgtatttacattgacaacagccttggatacgcctttgcctccgaatttttctttatctccgtctctcagctccagtgcttcgaattctccggtagatgcaccgctgggtgcggttcctctccccatggttccgtctgacagataaacctctgcttctacggtaggattacctctggagtcaataatttcacgtccgattactttttcaattgtcaaatgtttcatactatccctgaccctttcccatggatgatcctctgctcccattttgcagaagcagaaaggatcttcccacgacttattcacatgatggttagcttttactaactgcaataagtctatcgcaactttatgggattttcaataggcttaaacaggattttttctcatttacttttttctttttctgtgttttttccagccgtgccgcttccttacggtatgtctgtgtccgattctgacaaacgggacatactgaaggggcactcttcaaaggttctctgcaatctcatatgcctgttcatagaaatattcctgggcattcagcggttcttcatccgttggcaggatccggtagattccctcaccgttttcctgacgggcctgctgattgtctttcagcatgatccggaacatttccagaaggcgtgctttgatttcttcgtcataaaccggagcagctacttccacacggcgcagagtgtttctggtcataaagtctgcggacgcaatatagattttttctcttccttcacttccgaaaatatagattctggaatgttccagaaaacggccgacgatacttcgcacatgaatattttccgtcttgccgggaacctgtggaatcagacagcagattccacggatcaccatatcgatccttacaccggcacaggaagcttccaccagtttctccatgattttcttatccgtaagagaattcatcttcagtccaatgtaagccggttctcctgctctggcatgtgcaatctcttcatcaatcatatccagaatcttattctgcaggcatttcggagccaccagcagatgatccacatgtttgatcgtctctcccatggcaagagcctggaatacattggctgcttccagtccgatatctacattataagtcatcagcgacagatccgtataaagccgtgaagttttctcgttatagtttccggtaccgatctgtgtataatattcaatctgttcatctgtttttttcgtgatcagacagagttttgaatgaactttatagccatccagtccatagatgacacgacaccctgcatcctccagcaaacgggaccatccaatattgttttcttcatcaaaacgtgctttcagttccaccagtaccagcacttcttttccattttctgccgcttcgatcagtgcttctactactttactctgttttgccacacgatacagcgtcatcttgatggaaaccacatctttatcgttggctgcttcgtggagcatattcagaaacggattgatactttcatacggataggaaagcagtttgtccttctctttaatctgatccagaatcggacggtcaccggtaaaggccggggattttcttggtgttcttctttcatagaataattccggaatcttacgaagagcatcctcgatctggaaaacgaaggacagatccagcggtgcctgactgcggaatacatactgtgattttattgccagatgttcacagatcagtttcacactgccctcgctgagttttctggaaagttcgatccgcaccggtgcaagtttctttctttttttgatcagatctgccataaattcccggtaatccagatcttcatcgtacagcgcatcggcgtcaatatctgcatttctggttacacgaagcagggatttctcttttacctgataccccttgaatacttttggaatgtagtggaggatcagttcttccgacagcatatacgtattgcctcccggcaggtggatcagccgttcaaatacaccgcttccacacggtataatccccaggcgttcttttccactcttggtggtcaggacaaccaccgcatagatttctttatttttcaggaatggaaatggctgtcgtttccccacaatggtcggtgaaatcaaaccggaaatctccatatcaaaatatgcttccagaaatttattttcttcttccgtgatcttactgaaatccaccagacgaacgccgtattcctcaatcttttccatgagttttccatacacttcatcttttctcctgttcaggatctccacctgtggaagaatcgcctgaatctgttctttcggcgtcatatgtgttttattatctctggaatcttttgccaccagcatctgatcgatcagcgagcctacacgcaccataaagaattcatccagattgctctgatagatcgatgcaaatgtcaggcgctcacacagcggcaccttcgggttctccgcttcttccagtacacgttcattaaatttcagccaggacagttcccggttcatataaattgtctcgttcattgcttatccctttactttcttctaccttttatccaattgtcacattcacaaaagtactatatcaacttttctttaattctatgttgatgctctgtaaaattcatgttaaaaactcattttgctacacattattttcctttcagttcatacagatccgttctccgtgcggataataatggtagctgttcgcggatcgcatccacgcggtccagatctatttccgtgatctgaatgcccggtttctcatccatctgtgtcaccacatccccccagggtgacacgacaagagaatgaccccaggagatatatcctgcctgctcgtctcttgcatcggaagttccgatcatatagcactgattgtccaccgctcttcccctgaacattaactcccagtgtgccggtccggttgtcatgttaaaggctgccggtaccaggatcattctggcgccccgcaatgtcatcagccgtacaatctccggaaatctgcagtcaaagcagatacagattcccattttcccaaactccgtatcaaaaacggtaatctgatctccggcggtcagtgtcgcggactcctgatagcactgtccgtccttcacggcgatatcaaacagatgcactttgcggtgttttgcaatctggttgccctgccgctcaaagacataagcggtattgtacacatgtccttccttatctttttccggtacacttccggctgacagataaatcttgtatttttttgcaagagcacttaaccgttgccaggtttctccctgttccatttccgcatagaccggaaaacaaggtgtctggtacgggcagttgaacatttcgcccagggttaccagatcaatgttttcgtcctttatacgtttcagattccgctccagttcttccagatttttgcttttttcttcataaacatgagcctgaatctgggcgattttcaccttcattttttctccccctttctgtcacaaatatttgtaattctctgactttagtatagattttccataactttttgtcaatttatccttaaaaaaaggaggggattttcctcatgaaaagcctttttcaaacacgctctaacatattttacttccgttcgcggtaagtttaaatctgcagcccagcatttccgctgcacgtctgcacatcaacatccgttttaaaaaaatttcaaaataatccatcacactgcagatggaatcgtccaactccagtctcatgtgaatgactttcttctcaggatcaatctcaaggtttgaagaaagtgccgcataatttacccggtcatggatatcaaaatttgccggtaccggattctgtacccgatttctgcgcacatctgttttatctgccaggatcagtgccgcagaaaccgcatctaccgccgtaccggtttcttcatcgtgttgtccaatagccgaagtaatcgtcagaatatcttccagcttcatttcccgttcttttaagattccatatgcaagcacagcactgctgtgtgcatgatcatagcgattcacggtatttccgatatcatgcatatagcctgcaatttttgccatctccacctgtcgtctccgataccccagttccttcaggatccttcctgccgtctccgccactttcaccgcatgttttctggaatgttcggtatatcccagtactttcaggttacggtttccctgttcaattaaaaggttgatctcccgatcatttcttatctgttcatatcccggtttcatctgtattccttcttttctgttctcttttccagccgttgaattgcgtccatggccagttctgaccgctcacattcctccggactcatggtgatctgccagcataacgaacttcctttcatatgctctgctgcataagaaagtccgttggtgcgctcatccaggaatggccggtcaatctgattgggatctcccagcagaataatctttgtatttttccccgcacgggtgatgattcctttgatctgatttggggtagtattctgtgcttcgtcgataatcagatacgtttgaatcagggaacggccacggataaagttcaaagcttcggcctggatcagctcccgctcaaaaatctcttctatcttcccttttaattcattttcatctttatagcgttcctcttcattggaatcgatcagctgttccagattatccatgatcggccgcatcagcggagaaattttttcctgttcgtcacctggaaggaagccaatatcatcgtcaaactgggcatttggacggcagatcagaatccggcgatactctcctgacggatgattcagaactttctccagtccaacggccagcgaataaaaagttttactggttcccgccatcccttttacgatcacaagcggtgctttctccgccggctgcatcagtgcttcctggaaaaaatactgccctgcatttctcggatggatgccatatggctcggcttttcgataggccagtttacggatcatctctccctctactcttcccaactggctttttttctccgactgatcacttctcagaatcagaaactgattctctgtaagttccggataaaccttttctccctgctcatctgctttatacacaaccgcgacaggtattccctttttcttaaaatctttgaaatactcttccggtacaaatacttcatcccttccggtatattgaagtttctgttcttctacctgctccgcctcaaaatcttctgcctggattccaagaagttgtgctttcaaccgcaacagcagatctttggttaccaggatcaccggatctttttctttctcacgcatcccaacacacacctgaagaatacgattgtctgctctgtcatccggaagttcctccggcagttccacatatacaaagtttttttcgatccgaagaattccttcctgtccgattctgacccctttcagaagatctccctgatgtctcagctgttccagacagcgaatgacttttctggcattggctcctttttctccttctgcttttttcaaatgatccagttcttccacaaccaccagcggaattacaatccgattttcctgaaaagcccacagagcatttggtgcttgaatcagtacattcgtatcaattacataatttttcatgcctgtttatccctcctgcaaaatcttccgaaatctgtttcatcgcacatcaggtgcgatgaaacagatttttaaaaaaatgatgaatcacccttttacaggtgtttcatcattttatgaaatcaatatgaaatttcagatatcttttagaaaaatcaacgtaaaatatttttattttcccatcgactgcttttctcactgcagatttcattccactcacagtccccgcagatcttctcccgcaatcctgtatcgattacctttttctggactttctgcgcaaattccagaaagttcagttcttctccttctgtcagcccgcaggcctccagcacgccatgatcataccggaacactttttcctgcgcttcacagatttcctttttttctccgggattttcctcatcggtaaggaactgatgattcgggcacgcactgcagatctcgtccagcgaaaccaccagctggatcgacacatcctgttccagaatgtgtaacattttctccatatgtgcggaaaatccttcgctgtatccttttcctataaaatacgccagacacatcccgtgatgcggacgcaccggtattcgctttttctccatagttttctcatttctcacagccatctgctgtattgttatttctgattccgatatgcttccacgccccgtttcagccgttcacagccatccgcgatccggcttctctggcatgccaggttgatgcgtaaaaactgttcgccagtttttccgtactgcgcgccttccgacacataaagacctgtcgttttgcgaatcgcatcggcaagttctttcgcgctgcatccgagcgcactgcagtccaaccacagaaggtaggtcgcatctgcctctgtcactttcaactgcggaatctcttttcggatatagtcggtcatgtatgcacggttttcgaaaagatatgcacggagttcttccagccagtcttcccccttggtaaatgccgcgatcgccgcaccgatggcaaatacattcggttctgccacctcatccgtattcagtgcacgccacactttatggtgcagtgcctcgttcgggatcatcacggctgctgtctggatgcctgcaatgttaaatgccttcgtcggtgcgatacaggtcacactgatatttttacacgtctcggaagccgccgcaaacggaaggtatccggtgccaggtcgggtgatatcacagtggatctcgtccgacagaacagttacatgatatttttcgcacagttctcccacccgtgccagtgtctcccgctcccagattcttcccaccgggttgtgcgggttacacaggatcatcagtgaagtctgcggatccgataatttttcctccagcgcctcaaaatccatctcatactgttccccgtcatatgccagcgggcattccacaacatttcttccgttgttgacgatggaattaaagaaaatattatacaccggtgtctggatcagcacattttctcccggtgtggtcagcttgcggaccgtacttgagatcgccggtacaacaccggtacagaaggtcagccattcttttttgatggaaaactgatggcgtctctcccaccagtccatgtaggcctgataccagtcttcttccacatccgtgtagccgaacacaccgtgtgcggcccgcttttcaatcgcctcccgtacagccggggccgtctgaaaatccatatctgccacccacatcggcagttcaccttctgccacatcccatttcagagatccggtatttctccggtctgtgatctgatcaaaatcatagttgctcatgctgtatcttcctctctgttttttgcagtctgtcctatgcctcgacttcttttccctgtacaaaaatcttcgtctttgacggatctaccttatctttttccaccgtcagttctttgatctcatccgcacggatcacaccgctcgacggattcagcacgctgtcgatggttccgtggatcttggcatctacagaagagtattcaaatgccagtgtcgtattgatcagcttacagtttttcatcaccagattgtcaatataacacatgccctgcagactctcgatcgtacagtttaccagtgtcagattcttcgcattccatcccagatattctccggagataaaggaatcgtacaccgttacattttcactgttccagaatgcatccttggacagcatcgttgcgttgtgtacttccatattttttacaccgtcaaaggaataatttcccaccagccggaagtttttcagcaccagatcctggcagttcatgccgaaataatcgccctttgcatccacatgatccagttccacattctgacagctccacagcgtctctgccgcattcgggaaagttacattggtcagtttcagtccgttacaccggcggaaattcttcggtgcttcgatcactgcgttagtcacttcgatccggtctgtataccacacacccgcgcgtgccatctcaaaccaggtacaatccaccgccttgatatctttcgcataccacagcggatatttccatttgaacatgcttccgtataattcaatatttctgctctcttttaacggagactctccgtcgtcaaaaatagtatcataaattttcagatccttcccctgaaacagcgcacgctcgccggtcaggaactcctgatgaatctctttcatttctcttccatctcccataattctcttctcccattctgctgccattgatttcgttattctgacaggcttatttatatagaattattgtattctattttgtcagatatggcaaatacttgttttgtaccactgcattattatttcgttactgttcataacgttattacgccaccgcaatccacaaaagcactctgcacacaaccggcagcgtcacgattccgcatagtgtggttatcatcacgccgcccagcgaatatgctccatcggaaccggaggaattggcgagcataaccacagaggacatagtcggcatcgcggtgatcagagacatggtcatacggatctcttccgataccgggacgaagctcaggacaagataaaacagtaccggaaagatcaacattttgcagataacaattccgtataattccatctgttttacatatttgcatatatccatacaggcaaacacaccgccaagatagatcatcgcgagaggtgtcgccgttgccccaatattctggaatccagtctgcaagacacccggaagctttagtccggtcagtacgaaaagaattgccagagcgatagcaactgtcgccggattgatcagctttttcggatcaaactttccttttccactcggggaggtcagtttcactcctaccgtccacatcgccagctgatccacgatggtaaatacggatacatacagcatgccccgttccgggaaaatgctggtaatgatcgggattcccataaatcccacattgccaaacatcgtcatcgcccggtagatctgcgaccggtcaccttctacatgaaacagttttgtcaacgcaacgcccagtccaaataagagaatcgaggctgtcaccgccagtccgatgatggacagcgattgtaccagtgccgtccggtctacctggctgatcacattaacaaagatcatcgtcggcagcgaaagtttcatcacgactcgggcgatccagtcgagtcccttatcactcagcacaccggtccgcaccagtatcataccgatgacaagatagacgataaacagctcgatctgttccattaaaatccaaaatgtattcatttttttcgtttcctgttttctttatttctgtatatttcctagcatatatgtttgcaggatttcttctgtcggcagcccttcgttgtcgccacggtgctgtacctggatcgagccgatcgcattgccccgtttcgcacattcgctcaccggaagacctttcagcagtccgctcagtacaccaacggcaaatccatctcccgcgcccacggtatccaccacttttttcaccggataccccgggatcatatctcgaactacttccccgttttctttcttttcggatacataagcgccgttctttccatctttgatcacgacgagagccgcgcccttctgatgataaaaatcagccgctttttctttatctgtcgtgcccgcaaggatctcacattccccgattcccggcagtaccacatctgcgtaatttgccagatcattcagcacgtttctcatcgtctccccgttctcccacagagccgggcggagattcggatcaaaggtcaccggaatctgagcctctctcgcccgcttcatcagacgataggtcgcctctcttgcttctttcgagagcgcaggcggaatgcctgtcacatgcaccagcccgatctcctcaagatccagtgcatcgatctcttgggcagacagatgtgatgcggcagatccttttcgataatatggtgccgccggatcatgtccgtcttccacatattctttcagttgaatcccggttcgatagaccgtatcatacgtcagaagattcgttccgatcccattgtcttttagtgcctgttcgatataatgtccaaacggatcatccccaagccgggtaagatattccaccggaaagccaagccgggtaagcccaatcgccacattgacctccgccccggacattcttcttgtaaaatgctccacgcactccaacgcaccaggtgtatctgccagtaacagagccatcggctctccaaataataatgttttcttcatacttatttctcctgactgccccgtacctcttttaccagtgccaccgcatccgctgtcatctggcgaatcgcatcaaactgcccgctctggatcaggtcttttttcaccatccagctgccgccacaggcaaggatcacatcgctttccagataagaacggacatttttcagattaataccaccggtcggcataaatttcattcccacatacggagccgccagtgctttgattgctgccagtcccccggatgtttctgcgggaaagaatttgacaacttccagtccccgttttaccgcctgcgccagctccgatgccgtcacacagcccggaaataccgggatctgtttctcgatacagtaatccacgatctccggatcaaaacccggactcacaatgaatcttgctcctgcttcgattgcttcatccacctgccgtgttgtcagaacagttcctgctcccacgaacatctccggatattcctccagcatgatgcggatggattccttcgctgccgctgtccggaatgtcacctccgcacaaggaagccctccttcgcagagtgccttcgccagcgctcctgcatccttctcatcttccagtaccacaaccggtacaattcccatttcttttatcttttctgctactgtcatctgtcttctccttcccctgtacccgttttgtcagtgactcttttcttcccctttgtaccgggcacatcgctgctatcattatatcgactttgacaggtgctttcaattgtaaaaaagcgattgacattactttctgtttgctatatgatagtcacgacaaataaagatatttcggtaggtgaggttaccacagggatttggattttcctgagattgctgccgcaaggctgtggagacacggcgcgctggtcagcaggtcatgtcgtgaaggcataacctaatgcaattgatatatgccctgtgatactaaagcttgaacgatggtcaggatttttccgtgatgtattttgcagattctttcattgctcaggctttgaaggaatttttttatgctgatttttaaagaatgaaaggtggtgaggaaatggacgctggtgccagttatcacgcggaatgcgacgatcatataccaataattgcatatcggaggtacgtttatgatgaacaaagatatttttgtaaaactgctccaggaacgccgttacaaatcggtaaaagacgttctggacgtaatgaacgcagtggacattgcctcactgcttggagaatttgatgataaagaactggctctcgccttccgtctgattcccaaagaaaaggcggcagacgtatttgccaacatggaaagttccctgcagtctgtcctggtagaagtcctctcagaaaaagaactgaaagaaatcctggacgatctgtacatggatgacaccgtggatctgttagaagaacttccagccaatctggttacccggattcttgatgccagcggcccgaaggaacgggaaaccatcaacaaactgttaaattatccggaggacagtgccggaagtatcatgacaaccgaatacgtggatctgaaaccgcatctgacggtaggtcaggcactcgcacatatcaaggaaaccggtattcacaaagaaaccatctatacctgttatgtgatccagcagcggaaactgcttggcatcgtttctgcaaaagatctgctgactacggataatgatgtcctgattgaagatatcatggagacagaaatcatctctgtgtctaccctgaccgacaaagaggaagtggctcaccagcttcgcaaatacgatctgctggcacttccggttcttgacaatgacggtctgctggtcggcatcgtaacattcgatgacgccatggatgtcatggtcgaagaggcaaccgaggatatcaccaagatggcggctgtggctccaagtgaaaaaacttactttgaggtatccgcctgggaacacgcaaagcgcagaatcccgtggcttctggtactgatgttttcttctatcatcaccggaagtattatcacccgttatgaaaacgctttcgcggcaatcccgcttctggtatccttcatcccgatgctgatggacaccggcggaaactgtggttctcagagttccaccctgatcatccgcggaatcgccctgaaccaggtaaccttccatgactttttccgtgtcatctggaaagaattccgtgtttccctgatcgtgggtgttgtcctcgctgtcgccaacggactgcggatctatctgacctatcagcaggcaggtatggcaatcgtcatcgccctgtccctggtcgcaaccgttatttccgccaaactgctcggctgcatcctcccgatgttcgccaaaaaaatcggtctggacccggcactgatggcatctccgctgatcactaccatcgtcgatgcgagttccattatgatttacttctttatcgcaacgaaagtatttcgcctgtaggaattaaaaacattacaaaaagcattacagtagccattatatttttcttacatttttctaaaattcttgtttttatttggatatactcatataatataattacttatgacattttttcgtattgcagacagagacccgctgtttctgtctccatcacatgcagaaaggaattacaagtatgaatattaatgaatgttatcaggctatgggagctgattatgaggaagtcttcggacgccttcgcagcgaaagactgatcaccaaattcgtcctgaaatttcctggtgaccccagcttttcccagctccagagcactctggaagaaaaaaatgtagaagaagcgttccgtgccgcccacaccttaaaaggcgtcgcacagaaccttggattcaccccgctctatgaagccaccgccactctcaccgaagttctccgcgcaggcaacctgccggaagatgacaatatgatgaacgcggttgcgaaagaatatgagagaacggttgctgcgattgaacaattgaatgcgtaaatcaaaattggtccaccgaactaattattgatatgcagtgcaataaaaatgctcctgatgattgatcaggagcatttttatttatgcggacaacagagtcaaagtccatgcttgcacaggaccttggcgactgccgcgattaccgtattcttttctttatcatcggtccaatgagcatcgcgataatcatttttaccaggtcggccggaataaacgggatgacgcagactgcgagggctgcctggaaagtataacctgcgaccacgcagaaccatatggttccgaaaaggtaacatacaatggttccgacgatcataccgataagctgaagccatggtttgcggcagttgtcgatgaccagtccggcaataattgccattacgataaatccgatgatatatccgcctgtaggccctgccagttttgccggaccaccagtgaagccggaaaataccgggagcccaacgagtccgatcagaagatagatcagataactgatggttcctcttttccatccgagaagatacagggacagatagattgccaggttggtaaaggaaatcggaaccggtccgatggggatggacattggagcaagaatacaggtgaccgctgtcatcagtgcggttatggtgatttcataggttttgctgcgaggtaacgtactgctttgtgtctggttcatgttaaaaattctccttctaaaatttgtccgttatgcggattcaatctcataaataaatccggcatccgtgatcgttttgagggtatcttcaattccctgaccgccttctgtcaggtaacctgaggcaaagattgagtcaaccacactgagcagtttcttttcttcccctttaaaatatacttctcttccggcggcgcagcggatatctgcttttggcacaagaagtcttgcaaggcagagaactttcatgcagtattcggttgtcagcatggagatatcggcatctccaagcggagttcctttgatcggcagaagaaaattgatcggcagtgcctccggctgaatctcacgcagttcaaggagcatgtcaactacatcttctttactttcacccataccgatgatcccgccactgcagatttcaaaaccaattccctgaagcatgcggatattctgtacacgctgctcaaaagtatgtgtactgcagatattatgataataagaacgactgctgttcagattatgattgatccggtccaaaccggcttccctgagcattctggcctgtttttctgtcagaaaaccgatggagcagcaaagatgcgttccttgttctttcatcttccggatccggcgggcaagttcttcaatctctttatccgtaaatttcataccactcagaccgatacaatgtctggataaatgatactcatttacgaaatcattatcctgatacagcttatcttcatctacccatttgtacttatcaatatctgcggtagaacgacatgactgtgcacagtaagcacaatcttgagaacagttgccactgcgggcattggtaagaatatgaatacttacacgattccccttatatcgatatcgtaaactcttcgcgcgatcgatcagcacatccagctcttcatccggcgtgttcaatatagcgatcgcatcctccctggaaagaacaggtacttctttttcataaaattcggaattcataacatatcctttcatttgtcacgggcaaaatgccctttcatttttcgtacggatatcactttaacacataaaagtattaattgtcaactcattttaattttaagtttacatttcacatgtgtaaattcaaatatcgaatattcttccccctctggtgtatccctatgtctcagttggatgtgtaggattatgtatgttgtagtgtcttgaaacccggacgtggaaggagcaggttctggggtggggcaacatgctccttccactgttaaatttctattcgacataagtactcaacaacctcaatcgaaaaaagccggcatcaacaccgtaaaggaaacactcacatcaagaccctctcgtccaccaatccacagaaatggagcgcctgcccgtaagctgcagacagccttttgctggtgcccttagcaaagatgagatccatcgtttacggaatcttaggctcgagcgctctcgcgagagtcttagatgcagttaacgattagttcagatttgcgttaccagcggttgtctgcagcttacggacaggcgctccattttgttcggcgtaaaagaaaaaactaagcctccctgacagcatccttcatagatttcacatactccttcacataaggaacacactccaccccatactgtccgcaaagcttcacgatcgccgatccgacaattaccccatccgactgaccggccatcttctttgcctgctccggattcgagataccaaacccaaccgcacagggaatatccttcgccttcttcaccagttccaccatcgctccgatatccgtcgtgatctgagagcgcatacccgtaacccccagagaagaaacacagtacacaaacccctgagcttctttggcgatcatggagatccgctcatgagaagtcggtgcaatcagagaaatcagatccagcccgtactccttgcagactccgtcaaactcctctttctcttcaaacggtacatccggtaagatcagtccgtccatgccaacttctgctgccttcttcacaaaccgctccgtaccataagaaaacactacatttgcatacgtcataaacaccatcggaatactcgaattcttccgaatcttctcaaccatcgcaaacaccttgtccgtcgtaactccaccagacagtgcacggatatttgccgcctgaatcaccggaccctctgcggtcgggtcagaaaacgggattcccagttcgatcagatctgcccctgcttcctccatggcatatacaagctgctctgtcacctccagtgacggatccccgcaggtaataaacggaataaatgctttcccttttgtaaaactctctgtaattctcttattcatggatatcctcccctctgtagcgggcaatcgctgcacagtctttatctccccttccggagatggtaattactacaatctgatcctttcccatcgtcggcaccatcttcttcgcatacgcaactgcatgggcactctcgattgccgggataataccttccaccttagacaaatattcaaaggcatctactgcctcatcatccgtgaccggcacatactccgcacgtccggtgtcatacagatgggcatgctctggtcccacacccggataatccagtccggctgagatcgaatataccggtgcgatctgaccatattcatcctggcagaaataagatttcattccatggaagataccaagctttccggtagcgatcgttgctgcagtttctgccgtattaataccccgtccagctgcctcacagccgatcagacgtacaccttcatcttcgataaaattataaaaggttccgatcgcattcgatccgccgccgacacacgccagcacagcatccggaagccgtccctctttctccagaatctgctccttgatctctttggaaattaccgcctgaaaatctctgacaatcgtcggaaaaggatgcggtcccatcgcagaacccagcacataatgcgtatctgcgacccggtttgtccactctctcatggtctcggaaactgcatcttttaacgtggcagttccggaagtaaccgcatgaactttcgctcccagaaggcgcatccgatacacgttcagcgcctgacgctccgtatcctcttttcccataaatacttcacattccatacccatcatggcagctgcagtagctgtcgccaccccatgctgaccggctcctgtctctgcgatcacacgggtttttcccattttctttgccagcagtacctgccccagcacgttattaatcttatgtgcaccggtatggttcagatcttctctcttcagatacacttttgccccaccgagatcctctgtcatatgagccgcatagtacagcctggacggtcttcccgcatattcattcagaagctccgccagttcccggttgaactccgggtcatttttataatgattgtaggcttcctccagttccagaaccgcattcatcaacgtctccggaatatactgtccgccatgtactccaaatctaccttttgacatcgtttgtttcctccattcttactatttccactgcctgacagatccgtccggcatttttttttccatcaatctccagactgctgctcagatccaccgcccatggatgaagcagcccgatcgcttcccgcagattttccacatcgagacctccggccagaaaatacggtcgtccgacttcacccaccagagaccagtcaaacacttttcccgttccgccgcttccctgatccagtaaaatataatccgccacactctcccgggcccgctccacatcttccttcgactttatggaaaatgcctgaatcagcggtttttctgtcagtacctttaattcctgtatatattcctgcgattcctgtccgtgaagctgtgctatctgtatcgttccctcctcgagaagctctgccaccagctctttcggtgcattgacaaatacacctaccggaataattttctcccgcagtccccgtaccagttcccgtaatgttgtccggtcgatactccgtctgctttttggatattccacaataaatccacagtaatccggccttgcctcattgaccgccgcgatatcctccggccgccgcagaccgcatatttttattctgctcatgcttaatctctcctgctgctttttaccccgatatgcgttatacaggatttcccttccttacccgcatccgctctctcatttaccgggaaagtggtttcccgttcagcgtctcaagcatcgcctttttatccgggcttcgcatcagcgtttctccgatcagcacggcatccacccggttatcatataacaggttgatatctgcactcgtcctgattccgctttctgatacaaagaccacttcctccggtgccagattccgcagccggatgctgttattcatatccacccggaatgtccgaagatcccggttattgactcctacgatcttcgctccggcttccaatgcccgctctacttcccgctcatcatgtgcttccaccagcgcatccagccccagactttctgccagctgccggtactctctcagctgtacatcatcgagaaccgcacagatcagaagtactgctgatgcaccaaaggctttcgcctgatagatcatatactcatctaccgtaaaatctttccggagtaccggaatattcactgccgctgtaatctcttccagataccggtcggatccctgaaaataaaagggctctgtcagacaggaaatcgccgatgcacccgctgcctcatattcttttgcgatctccacatacggaaaatccggtgcgatcagtccttttgacggagatgctttcttcacctcacagatataggacatcccttcttttttcaatgtctgataaaaagacggtgtcggaagaatcgccggattctgttcccggtcctggatcctttcctttaattctgcaacagataccttacctttttcctggtcaatccgctctcttgtctttcctgcaatttcttctaatatattcatgcttcattactctcccgaatgaatgcttccagtttcttcagtgctgcaccgctgtcgatcagttgctctgccagacgtacgccttcttccagtgtccctgcttttcctgccacatacagagcggctccggcgttcatgcacacggcctgtcgtttcgccccctgttcactgccatcgaggattgctcgggtgatggtcgcattttcctgcggagtgtcaccttttaactcgtctttctcgcattttttgtaaccgaactgttccggaactatctcataaggagctaatttaccatcacagatctcacacacagcagtcggtgcactcatcgagatctcatccaggctgtccgtaccatacacaaccataccctttttcacgcccagtttcaccagaacctgtgccatcggctctaccagctcttcactgtagacgcccatgatctgcatgtttgcatttgccgggttcgtcagcgggccgagaatgttaaacactgtgcggatacccagttcttttctgaccggtgccacatatttcatcgcggtgtgataagtctgtgcaaacaggaaacagatcccgatcttttccagtattttttcactctgttccggtgtcagcgtgatctttacacccagggcttccagtacatccgctgctcctgatttggaagatgccgcacggtttccatgttttgctaccggaacaccacctgctgcgatgaccagagaagcggttgtggaaatattaaaggaattggaaccgtccccaccggtaccgacaatctccaggacatccatatcatgttttaactgcagggcatgggaacgcataccttcggcagatcctgtgatctcatcaatggtttcacccttcatcgctaaggctgtcagatatgccgccgtctgtacctgagaagtttctccatccatgatctcattcataacagcttttgattcttcatatggcagatcttctttttttgccactttgataattgcttctttgatcattgttctcttccccctctgactacatccataaagttctctatcataatcttaccatccggtgtcatcaccgattccgggtgaaactggacaccgtagatcggatattttgtgtgttctaccgccatcacttctccgtcttccgactccgcagtcactttcatttcttccggcagttcttcctttaatgctgccagtgagtgataccgcgctgcctgaaatgtctccggcagcccctgaaacagctgattttcaccgatctgatgaatctctttctgttttccgtgcatcagttctttcgcataggacaccgttccaccaaatgcttcgcagattgcctgatgtcccagacacacaccaaagaccggaacctttccggcaaaataccggatcgcctcaatacagattcctgcatcggacggttttccgggtcccggagaaaggatgatggcttccggtttcatcgcctcgatctcttccaccgtgtatgcatcgtttcgtacaactttgacgtccggctccacggaaccgatcagctgatataagttataagaaaaactgtcgtaattatcaatcagtactatcattccaatccctcctgtgcctgtgcaattgcctgaaccacagcccgtgccttgttgcagcattcttcaaattctttctccggtacgctgtccgccacgataccggcaccggaacgaatacagatttcgcccttctttttataaaccaggcggatcgcgatacaggtatccagatttcctgtaaaatcaagataaccgatcgccccaccgtagatgccacgtttgctgtgttccagttcttcgatgatctgacaggcccggaacttcggtgctccggagagtgttccggccggcaggatcgcatcaacggcatccaccgcatctttatcctctcgcagatctccgactaccgtagaaccaagatgcatgacatgtgaaaaatgttccacacacatgtatttttccacttttacactgccgatcttactgatctttccgatatcatttcttcccagatccaccagcatgttgtgctctgcccgttctttttcatcttttaaaagtccggcttccagttccctgtcctcttcccttgtctttcctctcggtctggttccggccaacgggaaagtactcagattcccggcttccagttttaccagagtctccggagatgctcccgcaatctcaatatcgtcgctggaaaaatagaacatatacggagatgggtttgtcgccctcagcaccctgtaggtatcgaaaagatttcctgtcgctttcgcccgcatcggattcgataataccacctggaaaatatcaccctcacggatgtaatgtttggctttctccaccatcttacagtattccgcttccggaaactgtggccggatatcggactccagcttcagtttttcgaattccatatgcggtccggttttcagaagctgtgccatctcttccagttttccttctgccttctgataagacgcttccagatcatcggtcatcactccggcgatcagcaacactttctgacggtaatgatcaaaggcaatcacctgatcgaacaacatcagatccatatccctgaaatcctgctgctctttatcttcgagttttaatttctgttcgctgtatttgatatagtcataggaaaagtaccctaccagcccgccggtaaatggtggaagttcttccatcaccggtgttttatactgttcaataatctcccgcagagtatcgcccggatgttccactttctttgtcacaaccatatcctccccggttttgcggatattcaggactccatccgtacaggtgatctccatcgccggctcataaccgagaaaagaaaatcttccccacacctccgtctgactggcactctcgagcagataacaatgcttacttgctttccgcaaaacccgcatcacttctacgggtgtatatcgatccgcatatagctccttacatacgggaatcctgcgatactctccactggctgcgatttcttttaccttttctaatgttggatacattcgggcacctcctgcaaatcttttctgttactgtctttccctttgtttttctgtcctgccgcgaaagtctcagtcaagcatgaaccttgacttgttgcccgcgaatcaaaattgattcaccggatcaattattgatacacaacgcgaaaaaacgcccgccctcgacagaaacttgttcttctgtcaaggacgagcgtatgataaactacccgcggtgccaccttgtttcacagtttgcactgtgcgctttgcggaatacctgcatattcccggcaactgacgtatgccccacgtcgcagaatactgagccgattcgaaataatgactgttcactgcgccctcagcggtccatttggcagcctgcatctccacccggctctcaccctcccggactctctgtgcgcgcataactgctttgatctccgcttcaacggtttactacactaaactttttctataaattaccacatacatatatatttgtcaaacacttttttcaaattttattgtttacttttttcttaattccatatcatccagctgtctactttgatataataccagtagaaacatcatcataaccatgattttcactgttccaggcaggatgtaaaaaactccggaactcattcaagcggatattcgcaatccgcttcgctacttgctcataactgaacagctgcaaattttctatacaggaggtacatactatgcgttatgaaattcagggcgacactttacccgttgttatctgttatctggacggcggtgaaaaaatgatcacagaaaaaggagccatgagctggatgtctccaaacatgcacatggcgacttctaccaacggcggcatcggaaaggctttcggacgaatgttttccggtgaatccatgtttcagaatatctatactgcccagggcggtcccggcatgattgcttttgcctcctgcttcccgggaagtattcttccttatcagatttcccccgggcgggaactgattgtacaaaagtccggttttctcgcttccgaagccggggtaaacctttctgttttcttccagaaacgcttcggttccggactcttcggcggtgagggatttatcatgcagcgccttgccggagaagggatggtattcctggaatttgacggccatgttgtcgaatacgacctgcaacccggtcagcagatcatcgtggataccggttatctggctgctatggaagccacctgttccatggatatccagaccgttcccggtgtaaaaaatatgctttttggcggggaaggcatcttcaacaccgtcatcaccggcccgggacatatatggctccagaccatgccgatctcgaatgtagcaggagcaatctcaccgtttattccgtcaaagtcttaattcgcagaatctattttccagactgtacagggaaccttactcatccctgcctagagcgtgtttgaaaaaggcttttcgtgagctgcgagccccagtttgtgggagattttatccgaatgagggcggcgtagcgggctacggcaaccgaatgagggtaaaatataccgcaaagtggggcttgcagattgcggaaatgatttttcagacacgctctagtatcacaggaattgtcttgtacaaatacagactttgattcgtttcccttgaataaatcaacagccggtatatgtttccctaaaaattcgaagcatacaccggctgctgtttttcataaactgcattccttattttggttcgttatattttcttctcgcaaactaccagaaatcccttaattgctaaaacaaatctctgttttctatccgcaggatatctttgcatgtaagcaattattcaaattttactctatttccggctttcaaaaatactgttctgctctcctgcattttcacacgcacccggacttcctggtctgttttgctcgtcagccaacagttcacactctctccttcccacgcgatatccaccgtaatcgcaccccgcgcgatcagaccctgcacagagcctcgtttccacttcggtgataccgccggaaggatcacgagttcttctccgtggctttgcagcagcatctctgcgattcccgcagtaaatccaagatttccgtcaatctgaaacggtggatgtgcacagaacaggttcgggtatacaccaccaccctggacagacatctctgcaaacggatctcgaacctgcaacatctgcgccacctgttttgcggcatgcgcaccgtcttccatccttgcccacatcagaatcttccacgcaagactccagccggttccttcgtcgccacggacaagcagactttttttcaccccttccagaagttccggcgtctctttcgtaattcctcttcccggatggaactcatacagatgcgacaaatgtctgtgttctacttccacctccgtgaattcctcattccactccagaatccttccgtcacttcccagctgtgtcggtacgatcgcaggcagctgttcacggatcgttcctgaaagagcaccctctttttttaatacttcacatgcttccagataatcccgaaacagatttcgaataattgccagcgtattttctgtatacagtgccaccggcactgcttctccctgatccaggaaacaattttccggcgatgtcgccggaaccactgccagtcctttatccgtcttttgtaacatgttgctgcaaaatctggcatgttcctccagcaccggaaaaatctcctgcaaatactctctgtcctgcgtaaacagatattcctcatagagattccggcacatccacgccccgccaaacggccagaacgcccagtttgccagtcctgctgccggtgatgtctttctccacagatccacgttatggaaacacgccgcaccttcacagtgaaaatatttctgcgctgtctccttcgcattttccagcagttcccggttcatccgcaccagcggctctgccagttcatgaaggttacacggaccggtcatccagtagttcatctcggtattgatatttaccgtataatcgctcttccacgccgggatccgatcgcagttccagataccctgcaagtttgccgcctgcgtgcccggtcgggaacaggaaatcagcagataccgaccataatcaaacaacagctgctccagccccggatcctcgccgtcttttttatactgttccagccgtttcgaaagatccattccgtctctgctgtcatctccaagcgtcagtttcactctctgaaaatacttctgatactctccgacatgttctttccacaactcttctacggatatcccggtctgctcctgatcctgaagtaaaagctttgcgggatcatttccttgcgtatacggatgtctggaaacacctgcaaacccggaacgaatcagtatccgcatagtaatttcacgaacattgacacagcgaactcccatctctgtcggaacaatctccccgttttccgtctcaaacatgcaccagccttcgtacggcattcctttttcctgcggattttccgaaaaaataaactcgctgccgtccccttctttcgctcccacaggaatcttactttttcccggcatctgcccctgcattttccatatttttccgtcccagctgtttcccgtaagaaacccgtcgtctgccgtgaccactatggtaaatgcttcctctgcccggatctgatacaccagaacctgtgacggtgcactgcaaaagcaacgatgttcataagattgcccgtgatttcgatatgtcacccgggcagttgctgtctcgagatccagttctctgtgatagtccgcaatttcccgttctccctcaaaccggatccgtaccgtgccgaaaggctcatacatctctacatcttccgccgtctcctgtgcctgattcaacacctgtgtagcctgaaggtaactcccttcttttgcatacacttctgcttttttaatatcctcatatcccataccggtgcgcggatcccccggataacccgaccagagggtatcttcattcaggcaaagcgtctctgcctccccgtccccgaacatcagcgctcctatccgcccgtttcccagcggaaatgcctcctgccagacagttgccggtgcttcaaatatcattttcatactctattctccgtttttcaacttcttatttttcctgttacctgctactttcttcatatcccgtttttatctgatttcacattgtctcagcggatacttttcattatcgttcgtaactgttcaatctcttcacagttgcaaaccaatacgcctcgtgaaatactgcctactgaataattattactgttctatcttccatacaatcgcaatcggcgtctctccctcacgatactcttggggaatcaccacctgtattccttcctccgtcatcttccattcagcctctttcttcgtatctaccatggaaatcccgcggattttcccctgatagggaatcaaaagtttctcttctactgcttccctttcctccggatacagccgaatcacatagacgacatcgccttttcgcgtaaatgccaggtttctgctccggtacggcgcacagatccgtgttccgtaaaccgcttccccgtacatctgcatccacacgcccagtccccgcaggctctcccaagctcccaccgggatccttccgtctggctgagggcttatatttaatgccagatttccgcccttcgccacaatattgaccagcagattcaccagttctctcggtgatttataatgatctccgtacgcataattaaaattagctcccagcgtcaggcagctctcccagggcacacgcagcggtttttccggcacacacatctccggtgtgacataattctcataagcaccgcccaccgtccggtctactgccagcacccagggctgcgtttttcgcacttcctccacgatctctcccagccggatatcctgtccgtttgttgctgctacccatccggcatcaaaccagaggatatccaaccttccatactgctttccaagttccaggatctgatcgcgggtaaatgcacggaaacgctcccaggcttccggattttcttttggattataggtgggattccttgtcgtttttccggtaaatactttctctttttcccaataatccggacagtgccagtccgcctttgaataatacaccccgatcccaagtttctcttttcgaaacgcgtcaaacatggcacggacgatatccgcatacttatgtgtatgaaacggacagtcctctgccgtcgtcttgtattctgtatatgctgtatcccacagacagaaaccgtcgtgatgttttgtggtcagaatcagataccggaacccacattcctttgccatcttcgcccattcctccggctgaaaagccaccggatcaaacgcacggtttaatgcccgatactgcctcttaaaaacctccccgtcatccgtccagtctaccgtctttctggaccactccgcatcctcatcactaagtgcccagctcgccaccatgccaagctgattgtacactccccagtgcaccatcaacgccagcttctgatcctgaaaccactccagctgctcccgtaaaaccggttcctccggccacacatacgcttcttcctgactatatgtatgaaccccctgattcacgatttcctgtttctgctcagtttcttttcccatttttcttctccattcgtatctttattcttttatactttccaatttctaagaattgtgagagtacgaagtacggaacaatccggtgtcaaaggaggcaaaataccttttgaccccaacatctttctgactgctacataaattcacagttaccctccgacagcatacccccatacgctgtccgtctattctatagtgtacaaaaaagaagtggcagattcaatcttttctgactgaatctgccacctttttactgtccactccgtgctaacaacacacttcgtggaatcttaccatttaccaataatccctgttttcacattcatcaaatatgatacatatgcaatacaaagaaaaagctttagttatctgtaactaaagctttttaagaggcgcagaccggatttgaaccggtggatactggtgttgcagaccattgccttaccacttggctactgcgccattatgaaattgtagaaaaatctttctcagatttttcagtgactccgacgggaatcgaacccgtgttaccgccgtgaaagggcgatgtcttaaccgcttgaccacggagccttgtttttttgtttgtgtcgtatctcagtgacgaatgttattctatcataggtttcagaagaatgcaagcacttttttaaaaaaattgtatctttttttcagaaattcctgtacaataacaaatgtatggatcatacagcgaattatgctatcattctaagacataattgtgctgtaaccgagtcaggcggatattcgcaattcgcttcgctgcttgctcataaccgaacaactgcttattgctcttcgcaatttacttaatgatacgtaaggaaaaagctgattgcaaagatccattcaatataattttcaggaggaaaatataaagatgaaggaaactatcttacttttcaatataaccgaccgtaacaccaaactgaaattagaacgcattctcttgccgctgaagctccggatccggcggatcccggtgtctcagtatggacagacactggctgcgctgtgtggtctggaagaacctgttgctctgccctccgagagcgttgttaccccgtctttttccgatcctatgatgatctttgcaggtttatctgaaatgaccctggatcgcgttctgacgggcttacgcgcgcagcagatccgtattccttataaagccattctgacgtccaccaaccagcactggacaccggaggaatgttttatcgagatcaaaaaagaacacgaacagatgcatggcttgaatcaataatctgttctgtcgaccgttcttagataggaacagccggttcgaaccacaaaaacattcaaaccggctattcctgtctttactcattgatttgtataataaatactcaatctccccgtttccatccgatcagttaaattcatcctcttccacatacttctcattcgaataggcaagaccattctgatatttcacagtcacatacagtgtctcgtctccgtcctgcactttcacatagcatacatcgtctttgaacttgtccgtgatctcgatcttctgattcttataatacagccataccgttccgtcgtcgttatattccacatccgggctgttcgcttcctccagaagttcctcacctgtcaatggacgctctgtgccatccgcttcataagcgattccaccaccgcttatttcactcgtttctccgttttcatcctgatactctatggtatatgtgccatcgtctgaaaccgtcatgtttgcagtcgtctggtctccgtgtaaccatacctgaaccgttctctgaataccgccaacatttgcggcataagcggttcctgttccgcccgccagaagaatacatcctgccagtgcagctgcggctactttcatattatgttttttgtttaatctgctcatattctctacctccacagaaaactgatcggaggtatgcaacaccgaaaatccctgtttgtaacgttctttatttgtcatcgtcccattcctccttcaaagtctcgcgaagcaacattcttccacgggataatcttactttgacattactctccgaaatcttcaggatctccccgatttccctgacactgtaatcctcgtagtaaaacagatgaatcacaattctatatttttcagggagtcccatcacggtttcaaacagatgctccgactccggtgtctcaaaaacgagtgtctccatataatcttccagggaagttttattcttcctccaaaatgaaagattcatattcttcgctttattgatcgccacccggatcagccatgcccgtatatgctgctcactttcaaattcttttttgctgttataatattggagaaacgtatcctgaacagcatcttccgcatcctgctgatttttgcatacgttaaatgccactgcgtacagactgttctgatatcgttccaccaattcctgtatcgtttgtctcatgagtctctcctgtatcaataacccttgcgccagcttaccggcgttgattatttgttttcaaaggcctttcactaataatacaaataacagcaggtaaaggttacaaaatttcaaaacatatataaaattatcctgaaccacaatatatctgtaaaatctgacctgacaaatatctgtataacaaaaaaacctgcaggatacattctcttgtatcttacaggcctattctatctcattcctcccggagctttccctgcccttcctggcataaaaaagctcccccagttggactcgaaccaacgacactgcggttaacagccgcatgctctaccgactgagctatggaggatcattctctttctctcttttctctccatgtaccttcaaaactgcacacacgtaacatccttcttcctactgctttgcgatcgaccgttccaggtcaaaccctcgaccgattagtaacagtcagctccatacattactgcacttccacctctgccctatctacctcgtcgtcttcaaggggtcttacttctttcgaatgggatatctcatcttgaggggggcttcacgcttagatgccttcagcgtttatcccttccggacttggctaccctgccatgcagctggcactgcaacaggtacaccagcggtccgtccatcccggtcctctcgtactaaggacagctcctctcagatatcctacgcccacgccggatagggaccgaactgtctcacgacgttctgaacccagctcgcgtaccgctttaatgggcgaacagcccaacccttgggacctactacagccccaggatgcgatgagccgacatcgaggtgccaaaccactccgtcgatgtgaactcttgggagtgataagcctgttatccccagggtagcttttatccgttgagcgatggcattcccacttaataccaccggatcactaagtcctactttcgtacctgctccacccgtcggtgtcgcagtcaagctcccttctgcctttgcactcttcgaatggtttccaaccattctgagggaacctttgagcgcctccgataccctttcggaggcgaccgccccagtcaaactccccacctgacattgtcccccagccgggtcacggctgctggttagaaacccagtactgcaagggtggtatcccaacaacggctcctcggcaactggcgttaccgattctcagcctcccacctatcctgtacatgcaataccgaatcccagtatcaagctggagtaaagctccatggggtctttccgtcctggcgcaggtaaccagcatcttcactggtacttcaatttcaccggatgcattgtcgagacagcgctcaaatcattacgcctttcgtgcgggtcggaacttacccgacaaggaatttcgctaccttaggaccgttatagttacggccgccgtttactggggcttcaattcaaagcttcgcttgcgctaacctctcctcttaaccttccagcaccgggcaggcgtcagcccatatacctcacctttcggttttgcatagacctgtgtttttgctaaacagttgcttgagcctattctctgcggccacatttctgtggcaccccttctcccgaagttacggggtcattttgccgagttccttaacaatgcttcttccgtcggccttaggattctctcctcatccacctgtgtcggtttacggtacgggtacaataagaacaatagcggcttttcttgacgcatggctcacatacttccctactagatttcggtccgcatcacgccttcggattgccctgcggtttttcctacaggactcctacctcgcttgcacgcggctttccattccgcgcctatgctctccacacgtgtccccacagttctgtcttactgcagtacaggaatctcaacctgttgtccatcggctacgactctcgtcctcgccttaggccccgacttacccagggcagatcagctttaccctggaaaccttagatattcggccgagaggattcccacctctctctcgctactcattccggcattctctcttcgatacactccacagctccttccggtactgcttcgttgcgtatccaatgctcctctaccaatgtctctagacattcctcagcttcggtgtcgtgtttcagccccggacattttcggcgcaggacctctcgaccagtgagctattacgcactctttgaatgtatggctgcttctgagccaacatcctggttgtcttcgaaatcccacatccttttccacttaacacgtactttgggaccttagctggaggtctgggctctttcccttttgactatccaacttatctcgtatagtctgactcccgataagcatctacacggcattcggagtttgatattcttcggtaagctttgacgccccctaggaaattcagtgctctacctccgcaagactctatcgaggctagccctaaagctatttcgaggagaaccagctatctccgggttcgattggaatttctcccctatccacacctcatccccacccttttcaacggatgtgggttcggtcctccattgccttttacggcaacttcaacctggacatggatagatcacccggtttcgggtctactctgactgacttttccgccctcttaagacttggtttcccttcggctccacggctctaccgtttaacctcgccagccagcgtaactcgccggaccgttctacaaaaagtacgcggtcgcactcataaggtgctcccacagcttgtaaacacagggtttcaggttctctttcactcccctcccggggtccttttcacctttccttcacagtactatgcgctatcggtcactaaggagtatttagccttggggggtggtccccccgacttcccacaaggttccacgtgtctcgtggtactctggatcctgccgtcccggtccggatttcgtgtacggggctttcaccctctctggctggctttcccaaaaccattccactatcgtttccagtaacttatgcagtccataaccccagcatgcacgcacgctggtttaggctcctcccatttcgctcgccgctactctgggaatcgagttttctttcttttcctccggctacttagatgtttcagttcaccgggttcccttccatacgttatggattggcgtatggatacctggagtctatccaggtgggtttccccattcggatacctgcggatcaatggatatttgctcctccccgcagcttttcgcagcttatcacgtccttcatcggctcttagtgccaaggcatccaccctgcgctctttcttgtttgaccttccagttttatagcgtttaaaactggcggttctctcgcagtttcatttcatcgtgtttacaatgtaatgagtagttattgttttgattcgttatccttaaaagataactcctcggatgtctctttttcctatctctaaacgtttaacgtttttttggattatttcgtatatgcagttttcaaggtacatgtttatgggctttaaaaatacaacttaaaaccctatgggcttaagtggactcgaaccaccgacctcacgcttatcaggcgtgcgctctaaccagctgagctataagcccacagtggagatgaagagattcgaactctcgaccccctgcttgcaaggcaggtgctctcccaactgagctacatccccatagatctggcatccacctgctctcccacaccgtctccagtgcagtaccatcggcctcttgggtcttaaccgtcgtgttcgggatgggaacgggtgtgtcccccaagcgcatcgacgccagaaatatcgttatccaattatgagtttccatattgataactcaacagtaaaacacattcatctactttgtcttcccttagaaaggaggtgatccagccgcaccttccgatacggctaccttgttacgacttcaccccagttatcggtcccaccttcgacggctcctccctttcggttaggtcaccggcttcgggtgttactgactcccatggtgtgacgggcggtgtgtacaagacccgggaacgtattcaccgcagtatgctgacctgcgattactagcgattccagcttcatgtagtcgagttgcagactacaatccgaactgagacgttatttttgagatttgcttacactcgcgtgatcgcttccctttgtttacgccattgtagcacgtgtgtagcccaaatcataaggggcatgatgatttgacgtcatccccaccttcctccaggttatccctggcagtctccacagagtgcccaacttcacttgctggctactgaggataagggttgcgctcgttgcgggacttaacccaacatctcacgacacgagctgacgacaaccatgcaccacctgtcttctctgtccccgaagggaaaggacccattacggtccggtcagatcgatgtcaagatttggtaaggttcttcgcgttgcttcgaattaaaccacatgctccaccgcttgtgcgggtccccgtcaattcctttgagtttcattcttgcgaacgtactccccaggtggaatacttattgcgtttgctgcggcaccgaagagctttgctccccaacacctagtattcatcgtttacggcgtggactaccagggtatctaatcctgtttgctccccacgctttcgagcctcaacgtcagttaccgtccagtaagccgccttcgccactggtgttcctcctaatatctacgcatttcaccgctacactaggaattccacttacccctccggtactctagattgacagtttccaatgcagtcccggggttgagccccggcctttcacatcagacttgccattccgtctacgctccctttacacccagtaaatccggataacgcttgccccctacgtattaccgcggctgctggcacgtagttagccggggcttcttagtcaggtaccgtcattttcttccctgctgatagagctttacataccgaaatacttcttcgctcacgcggcgtcgctgcatcagggtttcccccattgtgcaatattccccactgctgcctcccgtaggagtctgggccgtgtctcagtcccaatgtggccgtccaccctctcaggccggctatggatcgtcgccttggtaggccgttaccctgccaactagctaatccaacgcgggtccatctcataccaccggagtttttcacaccgtaccatgcagtaccgtgcgcttatgcggtattagcagccatttctaactgttatccccctgtatgaggcaggttacccacgcgttactcacccgtccgccactcagtcactaaggacttcatccgaagaatcagttcaaagtgcttcgttcgacttgcatgtgttaagcacgccgccagcgttcatcctgagccaggatcaaactctctaaataaatgtttgttccaggtcaaaatcaactcttggctaatttatcccttttactgtttttaaggatctttcgatcgttcgtttttatgattttaaaaagaactttcgaggaatgtgtttcactgttcagttatcaaagatcggttttgcattgccgtttgtctcaaacagctttgctattatatcatatcgtttcctgcctgtcaagaacttttttcaacttttttgaagttgtttttgtttctctcttgcagcaactttgatatcatatcacatccaaccagctgttgtcaagaacttttttcatttctttttgacagctttgtgatctctgcgagatctctcagatgcaactctgataggataccaccgctgcctggatttgtcaataattttttactatttttcttgtaatttatttattcgtgtcaatcattacatttcggacagctttctgatgtttataaaaagataaaaacagcgtccgcataagcagacactgtttttatccaaagatctgtaatacgatcttcatcaacatattattatcatagatccatgtcaggatcggatccaaccggatctgtccctgaaggtagattcctgccggagtgtcacatataattgttatgatcaggaaaatcacccagatccagatcattccctgtatacatccgatacagacacctccgattcgattcagtgtaccgatcaccggcaatgccgtcagaatatcaaccgcatacaggatcatatacatcaatattgtggcaatcgcaaacgaaatcaaaaaacagatggcattaataatcccataagaaagatattttcccagataatccgcaaagctttctaccgccagccgcttatagatctctgtattattattttccatcaatttgtcttttactgtctgcggaagcggcagttcttctatataagatacctgtcctgtgatgctctgcagatcatctctgccttccagctgttccagcagtacttcattacatttttcttcgatactgatctgccaggtggtcttttcacgaacaaaatcactgatatacggattcagccaggacgtaacaccaagaaccattaaaaagaataccattgatattgccatgcggagcatcccttttcggaatccctgaaccgcaaagatcagtaccagcgcaagtaatacaaatgtcagccaactcatgttttctctcctgtttattgtaatcgaatggtttccgttccgctgtcaagaatcaccatataacggtttcccgagatccgaaaaatattttctacatttccttcttttatcgttccctgatatcggcagttcccctgtaatgtatagatacccacttctttttcattgtatacaaaaatctgttccttgctgagtgcaacatggtcaaatgcgaaatctaccgtaaacttcgccttttgggctccaccagtcgtataaagcacgatttcatacgacttcttttcttttccggtcttataggccattccaacatactgatcatcgtgaaagacactcaggatatcatcgttcagtgtaatccggttactctcttccggaatctgttttccactgtatgtcaggaaaccattatccgaaaatgccaatgtctgagaatcactcagataattcacctgtggaatcagtgttcccacgtaattatatccactgacctgattgtccatctgattttgtcccgtattgccaaaattgtaaaacgccataaagcttgccggctgattatctttgacacaaagatacgaaactgccatcagctgcccgttatccgaaagcgagagatccaccgggtatcccggattgtctacactggttttggcagttaccagtttctctcccttctggtcatagacatggatccaggttatctctccatctgccagaaccacacctgtgattccctgcgggttgatgcacactttctctaccgggagttttgtctgtatatcagtaactcttccactgaaattgtaaaccccaatatccgttcctttcttatcataaactacgcaatattcaccacgcatggctactaccggattctccatggtctgcggttcattccacacttcttctccctgggcattcagaagtgtcacaccgtcaccgccgtattttaatatataatcaccaaattctgcatattccgctgtcgttgtcgtgtcttccagctctgttctcgtgatcaccttgtaatttttaaactgccagtgatccaccagaatcttacctccaatgacaagaccgacagccactacaagtgcggcacccgcaatcgcaagtttctttttgctacattgagattcgggtcgattcagcttccattcctttatcttctgcaaaatcttcataattaccccttatttgttccttttttactgttttttatcatagcacattgtcttcccttcggcaatttctatttctgctcaaagcaccgcttatgattccggcaacaaaagttttccgcctgcataaataatatcttctggagaaattccgttcaactgacatatttcattgatccggctgatcgtcccatattgtttctgacagatacttgtgagggtgtcccctctctgaatcgtatatgtgatagtcttaatatcagctgttgcctgctgttcttcctttttttcttcctgctgcatggattcctgggtgggcgatatactgacttcttccgatgtttccccgttcgcctgtggattcagactctcctgggtggtatcctgtgtcggaaccggtgccagactctcttccggctcttcagttgccatcggagaaagcagtggttcttcagcagctttctgtgcctcactggtcactgcaacactctgtccttctgtctgtaccacttcctcaacattctgatactgtctcagataaggcagacctaccgcaagcatcgccgccgcacagcacgccccggcaagccaacgatttcgcgcagaatgttttttcgctttttcactcttctctgactccgtcgtctcttttttctttcctctcaccgtcctcctgaaatcgatcactgcacggtccggtacatgttctgtctcctcgatagatttattctcactcatatcgatcatatacgcctgcatcggatcatttttttcataataaataaaatgtcccggcacacgtaccagctggttattctcatagacataaaacgcctcttccatctcacccggctccatcagaaacaacactttgtcattgccggcaaaatgatccagatgtgtcttacggatttcttcggtaatttccatattaaatcccggaaacccggcaaaccacccgacaatttcctgctccggaaaatattttttactgtcttcatacacctgtccccatactttatcgtcaaaacggatatgttccggcgaaagctccagatcccggatctgcagggcgctccggataaaaatataatctccctgcccggtccagtgacaggaaccaaacaaaatcgccgccacctcgtctccgtgaggatttcttgcgatctttttcaaaaaggtgtagacatagtcttccatatatatttttttcttccctttgatttctccgatttgtcttacgttatttggcagcttcacgtactctgcagtttcttttgtagtatcggtttcttctttataaatgacttcgatcatactcttcaccccttttagcccacagtatacgccgttttccatgcggattttgccgctttgtgcaggaagatacagattttttatcgacattttctgcgatttcttttctgtttggaaaacgtacgggcatattttttcatcgccacgggtacaatataggtaaattccgtaactgttctgtactctcccggttactgcataccataggatccccaaagaaaggacgcgtgagctgaatgcgcagagaagtttcatattatatcagagaaaagaaacgcaccgccagcactgaactggctcatgtgctgaaaaaatgcatcggacagattgaccggccctggaaagaaattatcattctttgcatcggaagcgaccggatcacaggcgacagtcttggtcctctgatcggtcagcagctttccagacatcgctggaaaaatatccatatttacggaacactggatacgccggttcatgcgctgaatctcgaatccgtacttgcagacatcaaaaaaagacatccatctgcgctgattctcgcagtggatgcctctctcggctctcaaaaacatatcgggtatatcaccgccggtatcggcccgattcatcccggatccggagtacacaaaagtctcccggcggttggcgatctccatattaccggaattcttaacgcttccggttcttttgaacattttctcttacagaccacacgtctttcttttgtcgttcagatggcagatactatcaccgatggaatccttcataccttttcacctgtctatgaacgacgcggccttcttcctgacggatggttccaccgggaagaacgacgagatctttgctgggcaaaggaggaatctaggctggctgccctctccatcgaaaccagttccggcagcatctcctgaagcaggtctgagcgcggcaccttctcaaagatccgttttaaaaaccacgcaaatggtttgccccagtatttgttctgtaatacttttgcataatgatccatgatttcccgggaaccacagtatttgtctgtcaggcagatcacatacgtttccgggtatcttggcggaatcacggataccggccacatatgcttggtaattacttctttttccaccttgttcagatgaaaatatttgcaggcatttcgataggcagtgatcggatgggtgatggcgtgcagccggtctcccgtctctttgctgtgttctctccagtcatacagaaacagatcgtggagcatgccgcctctcgccgctgagcgagcatccagccccagttttttgcagattttataattattgtatgccacatccagacagtgttcataacagtcggtatcgcagtgctgataatactttttcatttccagaacagccggatgactgacgatatcacgaatacactcatagaattccagattctcttttgtgcgttctctccgttttcttctgaccgtctcccgtgaatctcttgcccggtttgctgacattttttctggcatttttctgatctcctatattttcctgctgtacagttttttatacagacatctttttcaactttataaaacagggaatggagaaactttctctccattccctgttttattataccgtaagtgttctcttactgtaaagttctgtacatttatttttttaaataattacatatatgctttgacctgctcgtatacaccctggccatccagtttgtatttttccagaagttttactgcagggccggactcgccaaatacatcctgcacaccgatcttcagtaccggagtcggagctttctcacacagtacgtcgcagactgcgcttcccagaccgccgattacggaatgttcttctacagtaactactttaccgcattcttttgccgctgcaacgaccagttcctcatccagtggtttgatggtatgaatgttcacaacttttgcctgaataccgtcagctgccagtttttcagctgcttccagtgcggagtttacgcacaggccggtagcgatgatcgccacatctttgccttctcttaaagttacacctttaccgatctcgaacttgtagtccgggcggtcattgatcactggcactgccagacgaccaaagcgcaggtataccggtccctgatattcgtatgctgcttttacagccgctcttgcttccacatcatcggacggattgatgacaaccatacccgggatcgtgcgcatcagggcgatatcttcgttacactgatgtgtggcaccgtcttctcctacggagataccggcgtgtgttgcaccgatctttacgttcagatgcggatatcctacagagtttcttacctgttcaaaagcacggcctgccgcaaacattgcgaaagaacttgcaaacggaacttttcctgcggtagaaaggcctgctgcgataccgatcatgttacactcagcgataccgcagtcgatgtggcgttccggaaatactttcttaaacataccggttttggtggcagctgccaggtctgcatccagaactaccaggttttcatgctcttttcccagttctaccagggcgttaccataactttctctggttgcaattttctttacttctgacataatgcttcacctgccttttccagttcttccattgctactgcatactgctcgtcgttcggagctgttccatgccagcctacctgattttccatgaaggatacgccttttccttttacagtgtgtgcgatgattgctgtcggcattcctttggttgcttttgcttctttgaatgctgcatcaatctgatcaaaatcattgccgtcgatattgatcacatggaagttaaatgcttcgaattttttatcaatcggatatggagaacaaacttcatcaattgctccgtcgatctgcagattgttgttatctacgatcactaccaggttatccagtttgcggaatcctgccatcatggaagcttcccatacctgtccttcctgaatctcaccgtcacctaacagcgtgtatacacgataatcggcattgtccatcttgcctgcgatcgccatacccaccgctgcagagattccctgtcccagagaaccgctggacatatctacacccgggatatgtttcatatccggatgtccctgcaggtaagatccaagatgacgtaaggtttccagatcttctaccgggaaatatcccttctgtgcaagtgcgctgtaaagacctggcgctgtatgtcctttggacagtacaaagcggtcacgatctgcttttttcggatctttcggatccacgttcatctcttcaaaatacaagtatgtgaaaatatctgctgctgataaagatccgcccggatgtcctgctttcgcagcatgaactgaggttatgattcctttgcggacttcatttgctactttctgaagctccagtttgttcattctgtactcctttccgtacactgcttagaattactgtaactgttcattttcttcacagttacacatgattgctcattcgtcgtcttagagcgtgtctgaaaaatcattcccgcaatctgcaagccccactttgtgggagattttgcagaaagcctttttcaaacccgctctagtatgccatattttcaaaaatattgcaagactctatacttttttatgctcgtgcttcttctcagcccctactcgccgaatactgccttgtaatcatcctggaattttttgattccggcatcggtcagcggatgttttatcatctgttcgattactgcatatggaaccgttgcgatatcagcacctgccagcgcacaatctgttacgtggatcggatttcttacgcttgctgcgatgatctgtgtatccagaccggcaacatcgaagatctcagcaatctcgcggatcagatccacacctcttgtggaaatatcatccagtcttcccaggaacggagaaacgtaggttgcaccggctcttgcagccagcagtgcctggtttgcagtaaagatcagtgttacgtttgttttaatgccttctgcggtcagcactttgcaggctttcagaccttctactgtcatagggatctttacaaccatgttcggatggatcgctgcgatctctcttccttccgcgatcatgccttctgcgtctacggtagtcgcttttacttcaccgctgatcggtccgtctacaatagaagtgatctctttgatgacctctttaaagtctcttccctcttttgcgatcagggaagggtttgtggtaacgccacagatcacgcccatgtcatttgcttttttgatgtcttctactttcgcggtgtcgatgaaaaatctcattgttttgtcctcctgtttttcctgaaatctgcccggttattttcggtgttttgtaactgttcagtaccttcacagttacggtgttttttcttttctgccctcagtatagcagatttgtttttgtggtcaacaggcttgcgtatttataaatagtattttttattaataattgactgttattaattaatgtatgctgtgtttttcatcgtttattcaggttttttcctttattttcgctgttttctcatctattttattattaatatttccacagaaaccatttattttttctttttttcatggttgctttcatccggcgcatatccggtgcttccgcggacgatcagacgcggttcatactcgatatggtaaatactggtaggttcgtctcccttgcggtaactcttctgcgattcgatctttcgaaggatgatatcacaggcatcccgccctttctgatccacgaaatgttccactgttgtgagcccaatggtatggaacctggaaaacaaagtgttgtcacaccccaccaccgagatatctcccgggatccggtactgacgctcaagaagggcatccatcgcaccaaatgccatcatatcattcagtgctgcgatcgctgtaaccggctgtccttcccgaagcagttccacggtcagatcatatcccatccggtactctgactcaatattcgggatctccgtatctttgctgtctgccgcagagcgcaccagcacatggtctgaaagtcccgctttctcaaattccatcaggaaaccacccacacgtttctgccgctggtgctgtctcgccgtcagcggcggcgcgataaatgccacatcccgatgccccagttcaagtagatgacgcgccatcaggatccccggtttctgattgttcagagccaccgcatcaattgaaaattcatcgtcacggttgctgatcacaaccaccgggatctctccggacagttctgccacctggcggctgaaacttgggttacaggcatagatgattcccagcggctgcacttcccgcatcatccgcagataattttcctcgatcttcagatccctctgggtgttgcagacaaacacgccgtacccgtattcttttgccatggcttcgatgccttgcagcagcatgacataataagggtttgtcagtgtcgggcagaacacaaccagaagttttctgctctttgccgaccggcggatccgctgttttggcaggtgataatccagcttttctgccgcctctgtcacctgacggatcgtctctttggagaaagatacgttatattttttatttagtatcatagaaacagtggcctgggaaactcctgcttcccgggccacatccatagaagttgctttcttctttgccatcgttttttccttataattctacgcgtccttccagtgcacgcagtagtgttacttcatcgatgtactccagatcaccgccgaccggaacaccgcttgcgatacggctcactttgataccggtaggtttgatcagtttgctgatatacatggctgtcgtctccccttccagactggaattggtggcaatgatcacttcatccacatctttttgcagacgcagcatcagctcttttaaccggatatctcccgggccgatccccagcatcggggaaatagctccgtgaaggacatggtacacgccctcgtacttgccggttttttcataagctgccagatctcttgtattttccacaaccatgatctgtttatggtttcgcttcggattggcacagatcggacacagttcctgatcagtcagagtaaagcattctttgcagtatctgacattcgatctcgcgctggtcatcgcacccgcaagctgttctacctgatccttgggcatattgatgatgtgaaacgccaggcgctgggctgattttgcgccgatacccggaagtcttgacagctgttcgattaatttgctgatatgactgctgtagtattccatcttagaacgggaatcctccacccagaccaccggtcagtttggacatcacagcctgtgtctcagcttccatcttgcgaagtgcttcgttggtagctgccatgatcagatcctctaacatctctacgtcatccggatctacaacttcttctgccagtttgactttggtcacttcttttttgccgcttacggtcacttctacggctccgccgcctgctgctgccgtaaattctttctcttccagcgctttctgattctcttccatctgtttctgcatcttctgcgcctgtttcatcagattattcatattaccaggcatacccatgccgcctggaaagccaccacgttttgccacgattggttcctcctgttttctcttaaatcatatttttgcatcttttactcgtcttccggttcttcttctaccacgatatccatgtgaaccgtctgttttaatatatcatcaaccgagatttctgccaagtcctgatgcatatttgttttctttaaaagcatctccacttccacggtttttcccgtcatctgtaaaatcagatcttccagcagctgttttttatccggatcatctacacaggtctgcgccaggtcgttggagaattccacgtataatttattctccccggtatttccattatatttcggcacagcggttgttaaaaatgtcttgaacatcccctgtgtctgcatcacgatatttttccagttttccttgatccgctgcagatcctccggcgctgctttttccggtttcttctccggtgcagatggtgctgcctgggttggctgtaccggaataccgtcgttcattcccgcataacccggcaaagactgaactgccgccatcggaattcccttttccatctgctcttccagcacccggatccggtccagtacggaatccaggtttgtttccattgcaggtttacataatttaatcaatcccacttccaccagcacacgtttctgtgtggcatttcgtaggttgttggaaagttcagataacacgcggatatagcgcatcagcgtatcggtatcgatcagctgactttcttcctgcagcgctttcagattttccgaagatacatccagaacttcttccgcatcttccgatgtcttgaccaacaggagatttcgcagataccaggtaaaatcattgacaaactgtcccagttcttttccattgaccagaagatcttccaggatatggatgcagctggtgacatcctgctccagcactttgcgaagcaatttgctgaacacttccgtatctacggttcccagcacttccagcaccttgtcaaaggtcagttcctgtcccagatagaaggcgatgcactgatccagaagactcagtgcgtctcgcatggaaccgtcccctgctttcgccacatagcgaagtgctttctcttccaccggaatctgttctttctccatcagttcccgcagccgtccggcaatcgtatcaatggaaatacggtgaaaatcatacctctgacatctggactggatcgtcaccggaatcttgtgggattcggtggttgccagaataaagatcacataagacggtggttcttccagagtttttaacagtgcgttaaatgcacctgctgacagcatatgcacctcatcaatgatatacaccttgtattttccctgtgtgggacggtaggtaacctcctcccggatctcacggatgttgtcgacaccgttgttggatgccgcatcgatctcgatcacattcatggatgttcccgcctgtatcgccctacaggtcgggcactcgttacatggactgccgtccaccggttgctcacagttgaccgcttttgcaagaatctttgccacggtcgttttaccggttccacgggttccacagaacaaaaatgcgtgaccgatacggtccgcacgaatctgattttttaaagttgttacgatatgatcctgtcctttgacatcctcgaaggtgtcaggacggaacttacgatatagagcggtatagctcatatttctctgcctctcctcaatctgtcataaattgtaactgttcagtagccactgtctctcgaggtgtttttatatgaatatgacaaactcccgagacacacaagccaaaatgcaacaaagagatagggctgtcacaaagaccagcccttctccctctgttacattactttttataactgttccataatttcacagctatactttttctgtatcagtcaccgaaactgataccgattcttttggcatctttgatctcctgtgcatccggtgttaccaccttcagttttcctgcacactcttccaacggaactttttttgtctttccgttgatcagacctaccatgtaaccatactcatcgttcaggatcagttttgctgctgcagatccaagtctggtagacagtacacggtcgtacggacacgggcttccacctctctgggtatgtcccggaaccgttacgcggatctccataccggtacggtcttcgatctcttttgccactttataggaaacagatgggtaaagttttctgtcttcttccattttctttttcagttcttttttaccaagttgtgcatcttctttggaaatcgcaccttctgctactgccagaatcgtaaatccgcttccgtttctctttcttctctcgatggctcccactactttatcaatatcatatggaatctccggaatcaggataacgtctgcgccgctggcgattcctgcgtacagggtcagccagcctactttatgtcccataacttccacgataaatacacgattgtgggaggatgcggttgtatggatgcagtcgatggcttctgttgcaatattcactgcgctgtagaaaccgaaggtcatgtctgtaccccagatatcattatcgatggttttcggcagatgaataatgttcagaccttcttctcttaacaggtttgcagtcttctgagttccgttaccgccaagaatcaccagacaatccagattcagtttatgatagttctgtttcatcgcttctactttgtccagtccgttatcatccggtgtacgcatcagtttgaatggctgacgggatgtaccgaggatcgtaccgccacgggtcagaataccggaaaaatcttttgctgtcagcattcgataatctccgtagatcagacccttgtatccgttcatgaatccatagacctctagatcatcaatattgtgggaaagtccttttactacgcctcgcatggtcgcgttcagagcctgacagtcgccgccgcttgtcagtaaacctattctcttcataccttttttccgtccttcttttcagatttttgcacccggtctttcactgccccggttacaaatttttttcacaatcatctggttattattatagcccatttctgccactctcacaagtaaatatcaggattcagattgacaaatttaaaaaaacacgatatactaaatcctgcgcagccggggagttagcggtgccctatacctgcaatccgctacagcaggggtgataccaaactgagggcttttctttgcagagctgccttctgtaagtggcgttgacgtctgggtcttacgcaacaggaatctgtgaaccgtgtcaggtcaggaatggagcagcactaagcagaaccttctgtgtgccgtaagggtgcctgggccgagttaactgcagaagtaacgtctgtggaggaagttcgaagggcggtgcgcttttaaaattggaaaaatagccaacggggggacgcccggagggatgcaaataagggaagggacagcagtgcgcagagcgattttaagctatgtgctaactccgactatatttgcttgggtcagctgacccaagcaaaagtctacgtaagcacaggatcttaaaactcgctctaaccgcgcacaaaatgctgtcccttcccttatttgcatccctccgggctgggtgttggctatttttgtagggggtgggtggttgacgggaggtttttccaagacacttgtatttgtcgttaaaatcagtccaccggaccaattattgatatgcactgcaacgtaaaaaggctgcgaagtatatttttttcaaaatgtaactgttcagtaccctcacagttacgagtcaaaatgcatttcaaatcaccttcggtgatggcattttgacttgtatgtctcgggattttggcaaaaacatgccaaaacacctcgcgggatactaccttttgaatagttacttcaaaataaacttcgcagccttcttctgttgcattggttacggagatggagagatttgaactctcgcgccggttgcccgacctaccgcatttcgagtgcggacccttcagccacttgggtacatctccatggtgttacgaatcagcagattcgctattcattatacttccttgtttttcttccgtcaatacccgtttttgccgcttcttgatttcacgcagttctttgaagaatccactgagcatctgggagcactcttcctgtaaaacgccacgggtaacttctacctgatgattgaactgttccatctccagaaggttcaggatcgatccggcgcatcccgctttcgggttcatgcttccgatcaccacccggctaactctcgcctggacaatagctccggcgcacatctgacacggttccagagtgatgtacatcgtacacccttccagccgccagtcgcccagctttttactcgcttttcggatcgcattcagttccgcatgggagatcgtatttttatccgtatttctccggttgtatcctcttgcaataatctttccttcataaacgatcacacacccgatcggcacttccatcagttcacctgcttttcgtgcctgccggatcgcctcccgcataaaccgttcatccattttcttctcatccatcattcttccgctttcctgtcatcatatcttgtttcttctttgcatatgctaccatagaatactccaaaaaggaagtgtccattttgtctgcatacaaacgttttgtttcttatctttacgaatacgataaccggaaaaagggaaaaaaccgcggatttgtccgtgtcgaggtccgaaatcaccagtgctgtctggaacttcatatgactcttcccgcctgcccgtttatccctgtcttccgcgcctacgcatttgtcgcccgtcccggcacactgcacggtctgtttctcggcaatccttcctggaaacagggcaatgtatacggtcagttccggattgcagacaccagtatctgcaacagcagctggaatcttgatgatatcgacggtctcatcgttgtctgcgaaaccggacaacgttacgccacttgctggagtgactgtaagatttcaccggaagatctccttttgccggaatccgcgccgattcttcgggcagcctcgctggaacagccggaatccccggagacaaacactgtcagcacacacccggatccagagcccgcatcggactccttccgttcttccgacaccgcgcctgcccgtacacagactccctcattttcctggaaacggctgaccgaaagttatccacatgttacaccgtttttcgatgaagaaatccacaactgcctgcaattatccccgaaagatctttctcttcttggctctttcggagtttcctgtggcaacaaccagttttttctctatggcagccacgccttccagcattttcttctcggaaagatggaacatgaggacaccatctgctacattctggctgtccccggcatctatgaggagcgggaacggctgctcgccaatctgttcggtttcccctactttaagtccgcccgggcaaaagctgcacagcccggacatttcggctactggtaccggacgatccacaccgaaccgcaaaatcccgatcctatatcccccgaatctcaacctgtggaatcgttttccgaagaatctgctgaaaattctccagctgctcgcgcgagtaagacgtgaataccggacgaatcacctgctccgactctttatagttctgcagaaaataccgccggctcccggaaagccactgccctatggcttcgatatcttcccgtttgtgaagctccttcacgactgtggtgcggaattcataatccaccacatccgatttcagatattccaccatatgggtgatgctttccagatccggatggcggatcccggcggtctctgcatatttttcctggctgtttttgatatccatcgctacataatccaccagccccgcgtcaaccagttccctcaccagtgccgggcgggttccgttcgtatccaatttgaccggataccccagttctttgatctgtgccagcagtccggtcagtcccggatccagcgtcggttcccctccggtcacacagacaccgtccaggattccttttctctttctgagcactttcagaacttcctccgtctcgatcagcggctcactctccggtgccagcaccagaccggcattgtgacagaacggacaccggaaattacaggaaccgagaaaaatggtggctgccagccgtcccgggtaatccagcaacgtcagtttgttaaatccgtgtatcttcgccatacgctaccttacgaagcaaaaaatgtttcgatttcctttctggatgcctgtacggaaccctgtacgaaaaacggttttccgccaccccgtccctgtaatttccggttcatctcttttacaaattcacgaagatctccgtctttttctccgatgatataacgatagccgttttcatcgttgccgttgaacaccgcgcagcgaccgccacagctttccatcacatcagaagccagctttcttacgctgtccggtgacatatcttcctcgaacaacagctgatcgccgcatcctgctgtctgcgctgcgatcgtctcgatttttttcagttccattcctaccatacggaattttaactgctgatattctttctgtaatttttccactgtatctgcagtgtcattccattttgcggacagcagctgggagatcctgcggttctgttcttttaactgattggtatattccagtgcccgtctgccgcagagcatctcgatacgcataccacctttaaatttctgtgcggatactagagtgatctgtccgatctcaccggaaaagtctacatgaacaccacagcaggcacaaatatccatccccggccaggttacgatccgcacatcaccggtcagttctttcttacttctgtaaggcagcgttttcagttcttcctccgacggatgagtgatctcaatcggatgattctcccatacatactgatttgccttcgcctcgatctctttcagcaccgcttccggcacttcgccgtccacatccagcgtgatcgtctcgcttcccatgtgaaatcctacgttgttataaccgtatttttcatggatcagtccgctgatcagatgttcgccggagtgctgctgcatcaggtcaaatctgcgctcccagtcgatcctgcaggtcacttctgtcccctcctggatcgcttcccgcgtccgatgccagatttctccgtccttttcctgtacatccataacttccacccggttcatggttccgatgtcacatggctgtccgcccccttccggataaaatacggtctgatccagaaggatctcatatcctttcttcacctctctgcacgcaagcacttttgcctggcaggtggtctggtgagaatctttataaaataaacgttctgttctcatatgtatgtcctctttctgtctctgttctgacatgataactgctgagtatctttacagttacgctgcactttctctctgcaccatcatagtacgaaatcgggaaagttgcaagattactgttcgtttcgcgatgcacagaattcttgctgattgcacaaattcgcgcggtatgtctagagcgtgtttgaaaaaggcttttcgtgagctgcgagtcccagtttgtgggagattttatccgaatgagggcggcgtagcgggctacggcaaccgaatgagggcaaaatataccgcaaagtggggcttgcagattgcggaaatgatttttcagacacgctctagggttttctgtgatcttcgctcacaataataccccacgggatattagcagtgagaaataactgcatttctatgtgaccatgtcacagatgatttctttgctttttcttctgtttttgactatacttatactaaacatacaaggaggcgatctttatgcaggatgtagttatcatcggcagtggaccggctggtctgtccgccgctctttatatgctccggggtggattttccactactgtcatcggaaaagacaacggggctctggaaaaagcagaaaaaatcgaaaattattttggactggagcgtcccctctccggccatgaactgattgaaaatggaagaacacaggtacagcgtcttggcggtactcttttacaggatgaggttgtggggatcagctggaacagaaactatctgatttctaccgcctccacacagatcgaagcccgcgccatcattctcaccaccggtacttccagaaaaaccatgaaaattaagaatctcacgcagctcgaaggacatggtgtcagctactgtgctgtctgtgatgcttttctctaccgcggtgagtctgtcgccgtccttggaaatggcgagtacgcccttcatgaagtccaggaacttctcccgatcgtcgactccgtcacgcttctgaccaacgggctggaaccttccgttgacttcccaccggaagttacgatcattcaaacaccggttctggaacttgtcggcacagatgcactggaggctgtctgtctggaagacggcacgcagattcacccggcatgccttttcatggcactcggcactgcgaagggaagtgatcttgcacggaaacttggtatccggctcgaagatgaacggatcattgtcaatgaacagatggatactggactcccgggcgtttttgctgcaggcgactgtatcggcgggatcctgcaggtttccgtggcagtcggtgaaggagcgaaggccgcgctttcctgtatcaaatatctgcggtcgtgacatgctcccaccacttaaatcatagattttgaagtgggggcttcttgctcaatggctccactgagccaagtatctacaagctaccctcgcgtgccccgcgatttttgcccggacacgggcgtattttctttcttattgtccggatacggacagtttatgccaccagcatccttcttgcctcttcacggatgttgattgctgcatttcgatctctgtccatttcattcccacacgtacagcggtaaactctttcggatagtttcagctctttttttatctttccgcatttactgcattttttgcttgaagggaaaaaacggtttacctttactaattcttttcctttccaggcaaacttataatccagcatatcccggaacatcccgtatccattatcctgtacacttttcccaaaatgcaggcaccggctcatcgctttcatatcaatatcctccaccgcaactatatcgtaccgttctgtgatcctgcggctcagtttatgcagataatctcttctctgattgcgtattttttcatgacacctggcaactttctttttctgccgcacataattgtggcttccttttacacatctcgacagtttacgctgctcccttgccagccttttctcattttttctgaagaatcctgcttcttccatctcaatctcttctgaaaacactgccatcccctgcatcgcataatcaatccccagtattttggcattactgtaatccttatctgctgcttggttttcgcaactgtatccttcatacagcagacttgcaaaatactttccggatggctccatacggactgtcactgatttcaggcggcagttttctgcaggctccctgtgttttttcatggtgatccattttacttttggtagccggatccggctaccttctaccagaatatttccgttgaccacattggttgtatagctgttcttggagtgatgttttgacttgaaacgtggaaatccaaccttcggatcacggaaaaagtttttatatgctttctccagatgaagctggacatttgccagagccagcgaatctatttctttcagaaacggatactcttttttatacatggctggagtattttttaacatcttctttgtttttttatactcctggatcttatcattaagcatctggttgtacagaaaacgacagcagccaaatgtttttccaaggagtatcttctgttcttctgttggatagatccgaaaacggtatgctatgttcaatgctttttctctccctgggtttcgatgtattgacggattacttctaccggtgcccctcctgccgtcaaaaggcagaatctctggctccagaatgcttccttccaaagtttttcccggatttccggatactcttttttcagcagcctgctgctggcacttttatatgcattgataaatttactgagttctgttttaggctgtgcacgaaacattacatgcacatggtcaatatcatgattccattcttccagaacaattccataccgtggggcaatatattcccatatttcctttgctctttctgaaatcggatcattgataacttttcttcgatattttaccaccatgatcaagtgataatacatcaaatacactgaatgtgcattgtgatccatattttccataaagccagtcctttttttgaataattatcttatcaactgattctataataccatggattttatcatagaacaagtgttctttttttcatttttttgcaattcatctcccacctgtagaggaaggagaattcttgctatatattatgttaaattcttatgcaaccataacgagataaaataagcgacaggatatccatattaaaaacccggtatcctgccgcttattttctggcaaaccactatattattctcagcttttccgaatatgcaaaaactgccgcatccgaatcacttcggatagcggcagttcttttatcgtttgaacactttatattttttaattatttctgaggaccagctgctaccagagctttaccagcttcatttccttcgtatttagcgaagttcttgatgaatctgtcagccaggtctttcgctttctcttcccactgagctgcatctgcgtaagtatcgcgaggatccaggattccgctgtctacgcccggcagttctgtcggaacttcaaagttgaagtacggaatagtctttgtaggagctgttttgatatctccgctcaggatagcatcgatgataccacgggtatctttgatggagatacgttttccggtaccattccaacctgtgttaaccaggtatgcttttgcaccgctcttttccattttcttaaccagttcttctgcatattttgtaggatgcagttccaggaatgcctggccgaagcaagcggagaaagtaggagtcggttctgtaattccacgttctgtaccagccagtttagctgtgaaaccagacaggaagtaatactgtgtctgagcttctgtcaggatagatactggaggcagtacgccgaatgcatctgcggacaggaagattacgttcttagctgccggagctgcggaaatcgggcgaacgattttttcaatatgatcgatcgggtaagatacacgggtgttctctgttacgctcttatcagcgaagtcgatttttccgttctcatccagagtaacgttctctaacagtgcgttacgtttgattgcgttgtagatgtccggttcagattcagcatccaggttgataacttttgcgtagcatccaccttcgaagttgaatacgccgttgtcatcccagccgtgctcgtcatcaccgatcagcagacgtttcgggtctgtagacagtgtagttttacctgttccggacagaccgaagaagattgctgtgttttcgccgttcatgtctgtgtttgcggagcagtgcatggaagcgatgcctttcagtggcagatagtagttcatcatagagaacataccttttttcatttctccgccgtaccatgtatttacgataacctgctcacggcttgtgatgttgaacataacagctgtttcagagttcagacccagctctttgtagttttcaacttttgctttggaagcgttgtatacgatgaaatccggttcgaagtctttcagttcttcttctgtaggtttgataaacatgttagttacgaaatgtgcctgccatgctacttctacgatgaaacggatagccatacgggtgtctttgtttgcaccacagaatgcatctactacgaacagtctcttgttggacagttctttcagggccagctcttttacagagttccatgcttcctgtgttgcagggtggttatcgttcttatattcgtcagaagtccaccaaacagtatctttggagttttcgtccattacgatgaacttgtctttaggagaacgtccggtgtaaacaccagtcataacgttaactgctcccagttcactttcctgtcctttttcaaaaccttccagtgtagattttgtttcttcttcaaataacatttcataagaaggattataaacaacctctgtagttccggtaatgccatacttacttaaattaatttctgccattttacattaacctctttctttcataatatgataaccacctgcggatgcaggtttatggtatccctcaaagacagccacccatagcaactctctttatccctaattatacatatttgcgacacaaaatcaataaaaattcttttaaatttttgaaaagactagctaaaaactaggatttccggttttctttgatttatcccacgaatctcagtttctctatatgataatatcagaaccggaatttcttctggtcctgactttatcttttgcagatattttcctcaactttttgaagcaattacttgattgcagccgtctcgataatgaattttacgctgccatctgtatctttctcccagccatcgaatacggtgtagtctttgtcagcttctgtcactgcatccagacgatccatcagtgccgtcagatcgtctcctgccagatctgcaatcttctggattccttcttcgtcaaattcttccataccgtctgccagttctgtggagccgtctgccagtttcgtggttccttctttcagctgaacgccgccctctgccagtttttgggttccggacttcagctgtgcggcaccgtctgccagtttctggatacctgcacttaacgtatttccaccggactgcaaagctttgccaccgacgatcagggcactgcttcctgctaccagtttggctgttccgtctttcagggtactgttgtttgcgatcagggtgtcagatccttttttcagggtttcggttccctgagtcagggatgcggagccctgtgccagctgtgtgacaccgtcactgagggcggatgcaccggatgccagggttgtcagtccgctgttcagagattgggttccggctgtcagagctgctgctccattattcagtgtatcattttcagcgaccagcccactgcttcctttatgcaatgtgtccacagcatctgaaagttcacctgccattgtcgcaaatccattaagttttcctactgcagtcccaaattctccagcaccggatgtcaacttactacttccggccgaaagggtattgataccggcctccagcttttcaatatttccctgtgctgctgccagttcgctttctgcaccggtaagaccagcatctaccacttccagcgttccctttgctgttgcaaggtttttctgtgtttctgcattcacagtcacttttactttactggtgtcaatttctgcagctgcactctgttcaatcgcatcatcaacattgatatccatacctccgccaagttctgccagaacctgattctgtacttcttccgatacatttgctgctgccagtattgcttttacattagatgctttttcactcaatttactgtttgcctgcgaagttgctgcttgattagctgcggttttggcagagtctttcacacttttaactacttcatcactggcttctttcgcatcaatagttacattcttctgcatatcagcagcttcactctgtgctgtttcaactgcttttttcgctgttgttacagtatcttttatcgtttttactttgcttcctattattccggcattttcgctgacctgatcggcaccgtcttttaccagtgctgctccgtccgtgattgttccgcatgctgcagccacatcacctgccttggtcggtaaggacgctgccattccgagtgctccctgcactgattcttccagttgttccagtccggcatccagatcatttacatattttgtatacacagccagtccggactggagactcgatgcgccagcttccagctgttttccgcctttagccagatctgaaacacctgaaagcaaagctgctttcttttcattcaactgactgattcccgcattcagctgttttgctcccgtatttacctgatcgataccggcatttaactgtgctgcaccatcggtataagatttcactccactttgtaaacttcctgcaccgcttcccagactttccatacctgctaccagtttatcgataccggagatcaaagttcctttgctgttgttcatggtatcaataccatcttttaactgtcccgcgccgtcatcggcactgttcagaccatccacaagggtatctgcggaactgtccagttcctggatgccttcctgcagtgcacggcttccttctaccagtgcggtggaagattcggtcagtttatcaaggctgtcctgcaagtcatccagatcatcgatgtcatccaggcccagttcattcagtgtaccggtagttgccacggtagcggtcagcgccagggagaaatcttccacatctgcagtgatttccacataatccgggctttctttgtccttgaaggaatccagatcactcagtttcaggctgtcatacagtcccggaaaaccgattcccaggacgatgttattatttccatcggagatcactttaccgttggttacttctacattcgtaaaagtatcagtcggaaggatcattccggttgccatcataaaaggtgtgtaaattgtctctttctttccgttgatcttcgcgttctgggaagaattgttggtataatcgatacggatctttacttttccgctctttcctgccagatctgcagcactgatttccctgccgtccagaaagtatgtcatttttaccgataccggaagttctttgctggtttctccctgataatagatgtcattgccgtctgcggcccataccagtttgccattgcttccctgggtatagctttcctcaccctttacattggtgatatcgttcagttcgctgttgtcctcgagcgtgctttctttgtctgtattcttcagccagttactgacgatcactttttctacatttccattctggtcggcattgacatagacggtctgttctttttccggagtcgctgcggcaacagtcgttaccggaacggttactgccagcattgctgtcatacctgtcatcattgcctgtacatattttctcttcataacgatctcctcctaatgtttccgtctgaaattcagactggttttacaaataattccatcaaacagccagaacatagccggcaggaataataatactgcacacatactgatcagcgcgcctcttgccatcagcagacacagagagctgatcatatcaatctgagaatacataccaacaccgaaggtagcggcgaagaagctgaacgccgataccataaccggtcgaatgctggttttgtgagcgatctggatcgcatctttcttgcttttaccttctccgcgctctttctcgtaacggctggtgatcaggatcgcatagtctacggtcgcacccagctggatcgttccgataacgatggaagcgatgaacggaagttttgttcccgtcaggaacgggatacccatgttgataaagatcgcgccctcgatgaccataaccaggatcaccggaagggatatcgatttaaatacgaagaaaatgataaagaatactgccaggatcgataccgcactgaccactgcaaagtcgtggttggtgatctcgatcagatctttcgtacacggtgcttcacctaccagcataccggtcggatcgtactgtttcaggattgtgttgatctcactcagctgactattgacctcatcggatgctaccgcatattcgttcatgatcagcatcagttcgtagttatcactctccaggatttctttcacattctccgggatcatactctccggaaatgccggtccgatgatactttccagaccaagtacctgttttacaccgtctaccttttcgatatcggcaatcatgttgtatttctgtttggcatccagctccttatccagcaggatcatatgtgccgcacccatgtcgtattcttccgacagttttgtatttgcctggacacttgggagagtatccggaaggctggcatccaggttgtagtacacacttgcatgtgcctggaaataagcaaacgggataaacaatactacaaataagattgcgaagatcacatggtgttttaccacaaaatcagaaatcttcggaaaatccgggatcagctgacgatgttttgttttctccagtgcattgtcgaaaatcatgatcatggacggaagtacggtaacacagcagatcacaccaaatacaacgccttttgtcataacgataccaaggtcaagacccatggtaaaactcatgaaacacagggcgataaatccggcaatcgttgtaatcgagcttccgactacggatttgatcgttgccgcaatagcctttgccattgcctctttgtgatcctcttcgcctttttctctctgttcctgatagctgtgccacaggaagatcgagtagtccatcgtaacacccagctgaaggactgcactcagtgcttttgtaatgtaggagatctggcccatgaaaatattagttcccatgttatacaggatcgccatgccgatgcttaacaggaaaaataccgggatcagatacgattccatggtcagtgccagaacgatacaggagagaacgactgcgatcaggacgtagattgcaacctcggattctgccaggttcttggtgtctgtgacgatggctgacataccgcttaagaagcactgtttgcctgccagtgcacggatgttttcgatggcatccatagtctcatcggcagaggtcgtcgtatcgaaaataataaacatcagcgtggaatcgtctgcattaaaggcctctctgatgtcctccggcaacatctccatcggaatgctgatatccgcaaaactgtcataccagacaaccttgctgacatgttccacatcttcaatctgttcttttaactttgccacatctttgttttccatgccctcgcagataaacatcgaataggctcccgttccaaactcatccaccaggatatcctgaccctgcatcgtctcgatggaatccggcagataataaagtacatcataattgactcttgtgttgatatatccaaagacggatggaatcagcaacaacaatccgatgataaatatcggaattcgaaacctgacgatcttccttcccagcttctccatatcatattcctcccttaacctctcttatcatatttccgtcggtcgttttactgacttttggtcatttattgttataccttaaaaatgacttttggtcaatatttattttgcaaaaagttgaccaaaagtcattttatattttatgcaactttccgaaaatataaaaatgaccaattttcatttgacttttttgtggatatttccttataatatgggaaacaacgacaggaagggggctgatcccggtatgagaaaagtcgatcacaacaaacagcaaaaaagggaatccctgctggattccgctttctctctttttatagacaatggattcaataaaacttccattgcagatattgttaaaaatgcaggcgtggcaaaaggaacgttttacctttatttcaaagataaatacgatatccgcaatcacctgattgcccacaaggcaagccaggtgtttcagacttcttatctggcattgcaaaagcacacagaaatcacggattttgaagatcaggtgatctttattatggatgatattttagatcagctggcaaacaatctgaatctggtacgcctcttatccaaacatctgagctggggatttttcaaaaactcactgttcttcacaccgagcgaagatactccatccattcatactatctatgatagcatgcttcaaaatgccaatcatacctaccactctccggagcttatgatgtacatgattctcgaactggtcagtggaaccagctacaattcgatcctttaccagcagccggtaggtcttgaagaactcaagccacagctgcaccaggcagtacgcggaatctttaatcaataccgggcagatgaaattacagacattcctgaaacttaaaaaatgtggcgaagccccgtgagggaatctcttcgccacatttttatattcaaagtattgtctggacatgaagtcaaaaacagccatcacagggaacttcggcggatgcggttgcctcttgttcctctgcaatgactgaaacccttactttttggaagataaattgttggagagtaagggtataaaaccaccttctcatcagatcgatgaattctgatggaaagggattttaccgaatgttaaattgtaatacttccactgtatcccgttaatgattctgtatatccattataacccgttactgatgctgttgctttggttctatatctacccgaagatacaccagtaattgtataactctttaccgtctgcgcaacattagatgccgatgctgtttttgatgctacacgcacccattgacttccattccatttctgtaatgtgtatgttaccgttatggatttgacggtttcgctacatactgtttcagcacgaattcctatctgattagagcttattttgattatagaagtgtatatatttgcaatatacatcaaacatggtgctacttctccctgtgaacttgttgtaaaaatatcatcattattcatttctaccatttcatattgctctgtttcacttgctgatacaagactacattgagcaaccaataacatacagcttaatattaatgcaatatattttttcatactgatctcctttaataatattcgagtccctttaacaatatcataaaattttccaagtccatgttagaaacaatcgaaatcatattattgtcataaatcaaattgcagtataaactattatcctgtgtactttcgtaaatactcgtcttaatatctaattctggtatctccatttccttcacaaaattgtttttattcactgctccatccgatgtttcttctacttgtttcttttgacttacatatatatatgtattattttcaattgttctatagctaatagcccggtatcttttattataggtagcataagttactttactattatcatctagacttgtaagacaaattatcggggcttttgtttccattttcaaattctcatatagatcctttaaattgctttcgccaaatataatctcttctgaatcgtcaataatcaaactatcatcattttcttctacatttccatttgttgaatattgataatttccatcctcaaacccattttccgcggtcttcccaatatcatccgcctgagccaccgatgtaaactccagatgcgttcctatatgtactgcactgattgtaagaatcacggctgcacatgctcctgcgagaattcgtctttttatgtgttcttttcggcattctttttggtagatgcgttcgaagtctccattccattcttccggtatctgatattgggacagccctttgtcgcgttccagttctttcaaaatttcaggaagatgttctttaatttgcttgtattccggactgtcatatattttatctcttttcttcatcgaatatcctttctccggtctctggcgagagccgtctcacggtgaagtgaataacatcatccgaatacatggtgctggtagattaccgacgtttcttcctgaatatcccaagactttcttcgatctttctgcgcagccggcttcgtctgcatttgaaagcgttcgagacttccccggtcgtatcagaaaaatattcgattgccagaattctccgctcttcctctgtcagtccttctaccagttccattgcaatcattcttgcgatcactatgtcctgcacagaaccgacttcctgttgttcccgtaaagcaagaccgatcttttgtcccagttcttctgttcttttcctggaacggtagtaatcaattaccttggtctgagtcaccctgatcagccaggcaaactgaccctcatcgcctttatcatataatttgtcgattgcattcaataatgatgtccacacctcctgtaggatatcacgaatgtcttcttctggcaaatccggaaaatgttttttcacgtaccaatacataaactgcctatattttacgtaaagctcctggcatcgatcatggtccctcctatccacgataccacctccttcgttattcatagttcctcttcctgtttcctctttgtttatggcttcataatacacaactttcttacatttttcaatagtttttattaattttatacaattttttcttgttttattgtgcatttttgtatcactttgtctatatttgtcgtttttgcatatttatatattgcattttatcagaaagtactttcctgtaagtgagacaaaactcgtttcgaaaacgatgtactagagcgtgtctgaaaaaggtttttcgtgagctgcgagtctcagtttgtgggagattttatccgaatgagggcggcgtagcgggctacggcaaccgaatgagggtaaaatataccgcaaagtggggcttgcagattgcggaaatgatttttcagacacgctctagggacattctcgcgccagtggcgcttgtttagcaacggccggagtgaaacgtagattgcttgcgacatctgccttgtacgccgcagtgcgcatcctcgtggagcgtttcttacgttacagaaaagcaatttcccgtaacaaaaaaaacagatgacagatactgtttcatctgtcatctgtttcgtttttattcaaacatctctattgtcaccttgttactgatgaactgatagcggaaccgtaccacggtgttatctttccgggtagtgaaatatgccttattcgacgaaccgctcctcggatagccatctgcctgataggtggcagacaacgttccatacgtagaaatagaataatcgtaggttcccgcaaacggaatgaccaccgataaggtatacgtattatcaccaatataatacattctggtcagctcactgttggagtcattctttaccgctcccacatgagactgaaaacttccgtaaacaacaattttttccgggagtttcattccggtttcttcgtcacagacattttctgctccatagcggatcagcatctccggattgactgccttctcccgcagcgtgtggccggtcgcccataggcgttttgcagtctcttcctgatcgaatcccatcgggcaggctgcgctcttcgtgttgatctgataaaaatcctgtgcatccatctgaccgttatctgcgcgcttcatggccacttccgcgttgtggatcatccggcgaaacggcagttcgaaatatgcgttgggattattgatttcggtccacttgtaggtatattccagaaaatgattccggcctttctccggctggttggcaaaccaggcgatctggtcgtatccccaccagtctctccaggccagttcttctctcggtatattttcccggtcatcaacgaccagtccaccccagttgtcgtattccatgaattttcgcatactcgcggatcatactgaacagttctgttgtttttgccattcctttatcgttcgcggtatacaggtgcacctgccccatatggagtacctcatagccacagtcgatgtatcgggttgcccggtaataaaaccacagtcttgcttcctgccgggacagatccggaatccccccgtcttttgccggattctctctcctgctgataaatccgctggcatctgtatccattcctcttcggaaaatccttctttttttaccacgatccggcagtcaccgccccgttttttcccaagtttccggaagttttccggtgtcgcccttcctttctccaaaaaaacttctgcctgctcctgctgttcttctgcctgattcgtccatcggatcttcatcttatccacaccctacatacttttcccctgtatatttacacaatttcccggttatacaggggaaaccttgattgtcttattattttatcactcagatatcagtgaaagattcccccataaacctcgtcatatttatctaccagctgttttgccagcgaatacgaatttaccagcggatgtaacatcagcgcctgtacagcggtttctttggactgatttttgactgcctctacggtcagtttttcgtacattttgatcagacggatcaacagatagcaatgttccggtacttcttcaactctgaccggatggatgccgtctttggataccaggcaggtagtctcgatcacgtcttcatctgccagtcccgggatgcttccgttattttctacggacagtaccagatattttcctttttcactctgcataccttcgatgcagtccagcataacccctgcatatcccataccgtccggtacttccagctggcctttttccagcagcggacgttttgccagaccggattcgatgctcatgtaggaattctcacgaacctgcatataatacaggaagatctgcagtgcgccttcaggatcggcatcgatatccatatgcttcagttcgtccatcatctgaatattaacgttctcgatggtctttcctctggttgcacctgattttttgatattttccagtgctttttctctgtgatagtagtagtacagatattcgttcggcaggaatccgatggaacggagcaggtccggatcaaacatggagaattcctgtaccccctgtaaaaatgcatcgtccgccagcagttccggtaagatttcctcgccttttttctttacgctgcggatccaggacaggtggtttaatccgaaaaattctacatacagatcgtcttcttccacccccagattgtgtgccatgcggaacttggtgctacttggagcatcacagataccgatgatcttgtcgtatccggcgcttcgcagtgcctgtgttaccagaccggacggattggtaaagttgaagatccatgcatccggtgcatatttttttatcagttcacaatattccatcagaaccggaatggtacgaactgccatggagaatccgccgacaccggttgtctcctgtccgatcacgcccagatccagagcgattgtttcatctacaacacgggaatggtctccgccgacacgcaatgtggttacgatataatctgctccagtgatggcttccaccggatcggataccgcccatactttcagttcttcgtggtttctctccactacatgtttacataacttttcaatgattctctgtttttcttcctggatatcgtagagtacgacttcgtcaatgtgaagttttttatatctttttaaaagtccgttgataaaaattacggtacgtacacctgctcctccgataactgcaattttcataaccttttcctccttgttgtctctatttgtttctctcaatagtttcctggtttttgataaatgtttccagcttctcctctgtcggaaatccggtattgccacccagcgcggttacggagagtgctccgcatccgtttccgcatttcaggcattcttccatggattttcctctcaggaatccgtagacaaatcccgcattaaaggaatctccggctcctgtggtgtccacggcttccactatgtacggtgcggcctgatacaacctgccgtcttttactgcgatggaaccttttttgcccatcttgataaccgccatacctgcagtccgggcaaattcccgtgcagcttcctcagcactttcttttcttccgtagtgttctgcctctgtctcattcataaacagcacatcaatatacgggaagagatcccggatctccggtttccactcgccggtggaatcccagccgacatcaaaggataccgttgcctgtgtctctgccttgatcttctttaacagttccagatattcgttatgattgatggaacctgcatagccggtcacgtggatatgtgcggcttcttttactttttctacatctacattgacaatactgatcttttcgttggttccccgataggtcagaaaggagcggtctttttcattggtaaagctcagtgagattcccgtttttaactccttacttatcacaagcagagaatcatctacatggctttcccgaaatttgttccggattagttcgccgtaacagtcatctcccacctctccctgaaagaccgggtgaagtcccagcttgccgactcccagggtaaataatgcggcgccgccgccgacaaatgtttccatcacggaaacttcgtcttcctgtcccggttccggaaatttttccactcccgggatcacgatatcaatgttgacatcgccgtatacataaacatcccactttttcgcgttcataccttctccctctctcgtgtgcccggattttctgtcacttccgcagcccgttttgttcattaatcatgattcgcaccttcggtgcttgacgctgctttcgcagctatcatgaccgacattcgccgctcacgatgaataaacttcgtttattcccgctcgctaatgctcattgtatcatgattctgcagcaccatgtggtgtatttttttatacttttctcttttttctctataaaatctgcttttttgacttttctcagaaacagtaattttcaaccttatttttttcacagaaaaaggttccccgcatcgctcatagattcatctctatataaatgctgaacgaggcaaagaaccttttaatatttaacttaacctttcactgcaccgatcatcgcgccctgtgcaaagtatttctgcacgaacgggtatacacagagaatcggaacgtttgtaacaacaactgctgccatcttcagagaatcggatgttacagacacggtattatgcgccagtgcctgtgcaacagaagttacttcctgctgtgaattcattgcttttgtcaacatctgctgcagaacggtctgtaccggccacagtttggtgtcgttgacatagaatgctcctgcaaaccagtcgttccagtgatttactgcggtatacagtccaactacggcaattaccggtttacttaacggaagcatgattttcaggtaagtctgaaagaatccgcagccgtccagtttggctgactcttcccggcagatcttcctgtttcagtgcataacctgccagagtagttaccattaagcttaaaaacgttccgattacagttcttgcgatcgtgatcacataagctgtggtaatacttccgtctttgaatacttctttgaagttatccatggtgaactgtctcggccagaaccatacgccacccctcgctgcatcagctccgtcgttgaatgccagcgccactacgttcagacaggggagcagctgtttttctcacaatggacatttcttccggcaccagtggaaaaatctacactctgaaaaatgtccagtattttttatagatttatccactcaagttccgcacaaatcggataatggtcggaaagccatacttctttgtcgcggtcttcccatttttttacactgcggcaggtaagtcctgcataaccttcttttgcttttttaatataaatataatcgatccgttccggttcatcttccggttcaaatccgtgataggtaatgccaatgccctctgtatagttgacataatctgtccggcgtcagttgcatctactttcttccgtatttgcgaccattatagaaaatctgtttttttcctataatgtacagaacttttaaaataactggacttttctacaaattttttcagactattgacatcggcaatcggtctgtgtattctgagaatatacagtcggtatcgtaccggctgcaaggacagaaaacctacaaatgaaaatggagactactatggaagagatgaaaaccatttaccaggtagaaggaaaattatgcaaagactttatcggtcagatttcctacaccgtctgcctggatcagacttacggagaactggatattgaattttcttttggaccgcagcacttccgcccggaagatgtgaccccggaactgaaacagcgcctgcttgactactgtaaaaaagaatacggtatggaagaaggcacaccggaagaatgggaagatgccgtgtatcacggtatgaaaaccgagattcataccatggcaaccctgaatgataccttcatcggcaacattcacagacagctgacaacccgacacatgcattttaccgcaacagaagctaccgaaggatgtatcccacagtcaaccatcgaaggtgtattaaaagtaaccatcctggtattttccgtgctgctggataacaccaactacctactgacggtacgcgcacgttaagggaggaactttttatgtataaaagactggaattacacaatcataccaatgaatccgacgcagtatttacctgcaaagaactgacggactttatggtggcagaccaggtggatgccttcgccctgactgatcacaacaccatatccggacattgcaaaattaaaaattatctgaaagagcatccacagccaatcgactttatccccggcatggaatataccacttattacggacacattctctgtctgaacctgaccgagtatgtgccgtgggaaaatatcaacagacacaagccggaacttctcttccgggctgcccgtaaaaaaggagctctggtcggcgtggcacatccatattccttcggatggccgttcgcacagggctgccgtttcgagatgacgatcacggattattcctgctgtgacttcatcgagatcttcaacaacccggaaccgcttcacgaagtcaatgaaaaaggagtaaaactgtgggaaaatctggtgctttccggtgaaaaactggctgctacctgtggcatggaccttcatggcgacagcaccctgcacggacattactccacctacatccagggcgaaccgcacggcgatgtctgccaggaactctccgatgcgatccataaccagtgtacctgggtatgcaagggacctctgctggaagtacataacgatggagaagcactcaccttcaccatccaccagaccggaaaaccgggatacgaaccgctcaccggggatgattacaagatcaccctccgcaccaaagatcgggtcatcacctgcaatgtctccgaccagatcccgctggcttcttttgcagagcatgctattattatcccgatgcttttcgagaaagaaaccattatcgaaaacctcgtatgtacaagccctgtgatgtatctgtaagacagcataataaaagctccctgtcagtttttgacatgaacctgtcagggagcttttttattatgctgtcttatttttcattttttctgggatattccgtctgttgcaagaatttctttcttccccagcatgcacaccaccagtgccaggaatgtcatcactatctagctctttgcatctttcccctgacccttatacacaataacattgtaagtggcactccttataatcagaatataccataatagcataacgaaaaacaccggaaccctgatctctcaagtgttccggtgcccctgccaaggagtcgaagcgacgggattcgaacccacgacctctgcgtcccgaacgcagcgctctaccaaactgagccacgcttcgatatttaattattgctcatcagcaataactattatatatgataaaattttatttgtcaataaaatttttcatttttatatttatacctccgagcttttctgccttgcggcataaaaaagctcccccagttggactcgaaccaacgacactgcggttaacagccgcatgctctaccgactgagctatggaggatcattctctttctctcttttctctccatgtaccttcaaaactgcacacacgtaacatccttcttcctactgctttgcgatcgaccgttccaggtcaaaccctcgaccgattagtaacagtcagctccatacattactgcacttccacctctgccctatctacctcgtcgtcttcaaggggtcttacttctttcgaatgggatatctcatcttgaggggggcttcacgcttagatgccttcagcgtttatcccttccggacttggctaccctgccatgcagctggcactgcaacaggtacaccagcggtccgtccatcccggtcctctcgtactaaggacagctcctctcagatatcctacgcccacgccggatagggaccgaactgtctcacgacgttctgaacccagctcgcgtaccgctttaatgggcgaacagcccaacccttgggacctactacagccccaggatgcgatgagccgacatcgaggtgccaaaccactccgtcgatgtgaactcttgggagtgataagcctgttatccccagggtagcttttatccgttgagcgatggcattcccacttaataccaccggatcactaagtcctactttcgtacctgctccacccgtcggtgtcgcagtcaagctcccttctgcctttgcactcttcgaatggtttccaaccattctgagggaacctttgagcgcctccgataccctttcggaggcgaccgccccagtcaaactccccacctgacattgtcccccagccgggtcacggctgctggttagaaacccagtactgcaagggtggtatcccaacaacggctcctcggcaactggcgttaccgattcatagcctcccacctatcctgtacatgcaataccgaatcccagtatcaagctggagtaaagctccatggggtctttccgtcctggcgcaggtaaccagcatcttcactggtacttcaatttcaccggatgcattgtcgagacagcgctcaaatcattacgcctttcgtgcgggtcggaacttacccgacaaggaatttcgctaccttaggaccgttatagttacggccgccgtttactggggcttcaattcaaagcttcgcttgcgctaacctctcctcttaaccttccagcaccgggcaggcgtcagcccatatacctcacctttcggttttgcatagacctgtgtttttgctaaacagttgcttgagcctattctctgcggccacatttctgtggcaccccttctcccgaagttacggggtcattttgccgagttccttaacaatgcttcttccgtcggccttaggattctctcctcatccacctgtgtcggtttacggtacgggtacaataagaacaatagcggcttttcttgacgcatggctcacatacttccctactagatttcggtccgcatcacgccttcggattgccctgcggtttttcctacaggactcctacctcgcttgcacgcggctttccattccgcgcctatgctctccacacgtgtccccacagttctgtcttactgcagtacaggaatctcaacctgttgtccatcggctacgactctcgtcctcgccttaggccccgacttacccagggcagatcagctttaccctggaaaccttagatattcggccgagaggattcccacctctctctcgctactcattccggcattctctcttcgatacactccacagctccttccggtactgcttcgttgcgtatccaatgctcctctaccaatgtcttcagacattcctcagcttcggtgtcgtgtttcagccccggacattttcggcgcaggacctctcgaccagtgagctattacgcactctttgaatgtatggctgcttctgagccaacatcctggttgtcttcgaaatcccacatccttttccacttaacacgtactttgggaccttagctggaggtctgggctctttcccttttgactatccaacttatctcgtatagtctgactcccgataagcatctacacggcattcggagtttgatattcttcggtaagctttgacgccccctaggaaattcagtgctctacctccgcaagactctatcgaggctagccctaaagctatttcgaggagaaccagctatctccgggttcgattggaatttctcccctatccacacctcatccccacccttttcaacggatgtgggttcggtcctccattgccttttacggcaacttcaacctggacatggatagatcacccggtttcgggtctactctgactgacttttccgccctcttaagacttggtttcccttcggctccacggctctaccgtttaacctcgccagccagcgtaactcgccggaccgttctacaaaaagtacgcggtcgcactcataaggtgctcccacagcttgtaaacacagggtttcaggttctctttcactcccctcccggggtccttttcacctttccttcacagtactatgcgctatcggtcactaaggagtatttagccttggggggtggtccccccgacttcccacaaggttccacgtgtctcgtggtactctggatcctgccgtcccggtccggatttcgtgtacggggctttcaccctctctggctggctttcccaaaaccattccactatcctttctggtaacttatgcagtccataaccccagcatgcacgcacgctggtttaggctcctcccatttcgctcgccgctactctgggaatcgagttttctttcttttcctccggctacttagatgtttcagttcaccgggttcccttccatacgttatggattggcgtatggatacctggagtctatccaggtgggtttccccattcggatacctgcggatcaatggatatttgctcctccccgcagcttttcgcagcttatcacgtccttcatcggctcttagtgccaaggcatccaccctgcgctctttcttgtttgaccttccagttttactagcgtttaaaactggcggttctctcgcagtttcatttcatcgtgtttacaatgtaatgagtagttattgttttgattcgttatccttaaaagataactcctcggatgtctctttttcctatctctaaacgtttaacgtttttttggattatttcgtatatgcagttttcaaggtacatgttcgctccgctcacatgtagatcgcacagccttcggctggcgcctggccaactcgggatctgcttcgcagacacctcgcgggatgttcaccacggaacgttttctttattttactaaagagttttgactgatgctttatcagtcatcaggaaactgaacttgcgttcaatcctctgatcactggtaaaaccagttatatgtaacagcacttccctgctgatgtgggttggcacggatcttttcaactcaaatggaatctcataggaacgctccggtgtcaccgggttctgaatatctatgcctgttttattgtaatagaacttttccctgttcttttttaagggatccggcatccacctactctcccacaccgtctccagtgcagtaccatcggccgctcaggtcttaaccgtcgtgttcgggatgggaacgggtgtgtcccctgagcgcatcgacgccggaaatatgttacctcttcggtaactcaacagtaaaacacattcatctactttgtcttcccttagaaaggaggtgatccagccgcaccttccgatacggctaccttgttacgacttcaccccagttatcggtcccaccttcgacggctcctccctttcggttaggtcaccggcttcgggtgttactgactcccatggtgtgacgggcggtgtgtacaagacccgggaacgtattcaccgcagtatgctgacctgcgattactagcgattccagcttcatgtagtcgagttgcagactacaatccgaactgagacgttatttttgagatttgctcacactcgcgtgatcgcttccctttgtttacgccattgtagcacgtgtgtagcccaaatcataaggggcatgatgatttgacgtcatccccaccttcctccaggttatccctggcagtctccacagagtgcccaacttcacttgctggctactgaggataagggttgcgctcgttgcgggacttaacccaacatctcacgacacgagctgacgacaaccatgcaccacctgtcttctctgtccccgaagggaaaggacccattacggtccggtcagatcgatgtcaagatttggtaaggttcttcgcgttgcttcgaattaaaccacatgctccaccgcttgtgcgggtccccgtcaattcctttgagtttcattcttgcgaacgtactccccaggtggaatacttattgcgtttgctgcggcaccgaagagctttgctccccaacacctagtattcatcgtttacggcgtggactaccagggtatctaatcctgtttgctccccacgctttcgagcctcaacgtcagttaccgtccagtaagccgccttcgccactggtgttcctcctaatatctacgcatttcaccgctacactaggaattccacttacccctccggtactctagattgacagtttccaatgcagtcccggggttgagccccggcctttcacatcagacttgccattccgtctacgctccctttacacccagtaaatccggataacgcttgccccctacgtattaccgcggctgctggcacgtagttagccggggcttcttagtcaggtaccgtcattttcttccctgctgatagagctttacataccgaaatacttcttcgctcacgcggcgtcgctgcatcagggtttcccccattgtgcaatattccccactgctgcctcccgtaggagtctgggccgtgtctcagtcccaatgtggccgtccaccctctcaggccggctatggatcgtcgccttggtaggccgttaccctgccaactagctaatccaacgcgggtccatctcataccaccggagtttttcacactgtaccatgcagtaccgtgcgcttatgcggtattagcagccatttctaactgttatccccctgtatgaggcaggttacccacgcgttactcacccgtccgccactcagtcactaaggacttcatccgaagaatctgtccaaagtgcttcgttcgacttgcatgtgttaagcacgccgccagcgttcatcctgagccaggatcaaactctctaaataaatgtttgctccaggtcaaaatcaactcttggctaatttatcccttttactgttttttaaggatctttcgatcgttcgtttttatgattttaaaaagaactttcgaggaatgtgtttcactgttcagttatcaaagatcgttttgcattgccgtttgtctcaaacagctttgctattatatcatgtcatttcctgcctgtcaagaacttttttcaacttttttgaagttgtttttatttctctctcgcagcaactttgatatcttatcacatccaaccggctgttgtcaagaacttttttcatttctttttgacagctttgtgacctctgtgagatctctcagacgcaactctgacaggataccaccgctgcctggatttgtcaatactttttttaatttttcttataatttatttattcatgttttttactatatttctgacacttgattgactcaccagtacatcgtttcgtaaataactgtatcattcacgcaggatacaaattcgagtgtacagttcacaaaacagaccgccaggatgtttcccacacttcctgacggtctgtttgtctgtttctgttatgatttatatgtcatctccgaaggtgatcgtgaagatactgatccatcgcgtaatttgttaattgccacattcgatactgatttcattaaatttctccaaaatcgtatcaacgttcatatttttcttttcgtctccttccagatccatcactgcatgtccctgatgcatcatcagcaggcggtcaccgtattccactgcataccgaagattatgggtaaccataatagtggtcaattgtttctcccgtacaactttatcggtaagctccataatcagttctgcggtcttcggatccagcgcagctgtatgttcatccagaatcagaaagtcaatcggtgtcatcgtagacatcagaagcgacattgcctgtctttgcccgccggataaagaaccgacttttacatgaagcttatcttccagccccagattcagctgacgcaattgttcctgatagaacgggattctgctcttatttgttcccatgctcagaccaaagaattttcctttgtgatctgccatggacatattttccagaatggtcatattcggacaagtgcccattgccgggttctggtatacccgtccgattctgcgcagacgacggtattctttttctttggtaatatcctgcccttcaatgagtatcttcccgctgtccggggtgatgcttccgcatacgatgtttaacatagaagtttttccggaaccattgctccccactacggatacaaactgcccttttttaatagaaagattaaaatcctcgaacaggcacatttcatttaccgtacccggattataatatttatgaatatgttgaagttcaagcattttttcctcctttctgacctgctgccgtacctttggctttctgttttctttccatactgatgacaaggatcaccaggaacagtacggcagtgatcagtttcatggactgtggatcaaagaagcggatggctatcgccacacatcccttatagagaatcgagccgatgataaccgctgttgtcgtttttacaaatgtcagtttcttaaacaggctggttccgatgatgacgctggcaagaccgatgaccatagagccggtacctgttgaaatatcgaatactttctgttcctgtgcaaatacacaaccggataaagccaccagtccgttggagatagcaagaccgagaatcttaacatttcctttgtcttttgccagagcagttaccagattatcgttatctcctactgcacgcagcagatacccggatttggtctgcaaataaaaatccagcaggaattttgcgatcagaacaacaagtaagatcagaacgatcttcatgtatcccggaatcgtttctccgaagagggattccagcataccgtttttaaacatagtttcctgagaaaacagaggaacgttattggttcctgctattttcagatttacagtgtacagtgcggtcatcatgataattccggataacaggtcacgaactttgcatttcacatggatcagaccggtgcagatacctgccagaacaccgaccagaaatgctatcggtatagtcagatacggattaaccccacgtgtaatcagtgccgctgtcacagctgctcccagagggaaacttccgtctacagtcagatccggaaaatccagaatcttatatgttatataaatacccagagtcaggatgccgtagatcagaccctgctccacaatcgtcatgataaaatccatcacatttttcctccgcttttatttagccctcggaaatctcggaaaatgtttccactgcacggtcgttcatgctgtccggaactgtgattccaagattttctgctactttttcgtttacatacaggttactttctgtcagcagctggtattccatatcttctgcttttacttctcccttcaagattttcgctgccatcttaccagtgtcttttccaaggctgacatagtcgattccttctgccgccagacatccgatcttcacctgttctatttcacttccgaataccggaatccctttttcgtttgcctgatccagaatcgccgggagagagctgactaccgtgttatctgtcaggttggtcaggcagtctactttcgtcagcagatctgcggttgcaagagaaatctcggagctgctggtgattcctgcggtctccagggtaaatccatactgatctgccagctcttcgtactgactgatgctgtatacagagtttgcttcgctggtggtgtaaaggattccgatggtttttgcatccggaaggatctcacggatcatctttaactgtgcttctaccggaagctgatcgctggttcctgtaactgcacctaccggcattttgtcatccgttgcaagttctgcttctaccggattggtaactgcggtgtatacaaccggtatccctttttccattgctgcgttgtaggcagcctgagcacttggtgttgcaattgcacagatcagatccatgttatctgtcacaaagctctgtgcaatctgggatgcggttcccatatctgcatctgcattatttacttttacggtcaggttcttgccctcttcgataccctcttctttcagaccttccagaaatccctcacgacagttatccagagaaccgtgctctgcgaactgggaaataccgatagtatagctttctccatctgtagcttctgctgtttctgtgttttctgcatcatcggtgctgtctgtcgtttctgttgctgctgtatctgtagtcttggtatcgcttcctccgcaacctgccatagatgctaccattactgctcctaagattactgccagtactttcttcttcataatttctttctccttttcttttccttttttagtgtttcaaaagcaaaagagatggattttttgttttttataaaacaaaaaccgcctcaagctaattatgcttgagacggtaataaaattctttattatcgcggtaccactcaaattgacgaatcgtccactttacacgtactaacatacgttcctcattgataacgggtttggttcccggcagtgcctactctttaaaatctttatttcgggctgccctcgaaagtccattcagctataaaatccatgcgacaatcacaccacctgccactctctgaaatttcttttaaagcttactcctctttctcatcggttttgcttttgatagctctattctatgctctattctttcatttgtcaacactttagtgtaaaaaagttgtaactattcagtagccactgtcccgcgaggtgttttgacatgaatatgtcaaaatcccgagacatacaagccaaaatgccatcaccgaaggtgatttacgcgagcaacgagtcaaagtccgtgcttgcacggaaccttgaggagtgccgcgataacgataaaaaatcgcaaagcgtgtttttatcgtttaaatgcattttggctcgtaactgtgaaggtactgaacagttacaaaaagttttattttagttgttgggcacggagtgaacagtaacttattttttcactcgacagccaccggacgcatcatggaagacagttcctgccggtattgatcggctttttcctgattgccctgttctttccgtaccatctttgtaattcccggatactgtcccgggaagctttccagcatgatactatctccataaatcaggtaaacatctccgtccgtcatatcttcttctgtcagcttctttccgttctcatccgtaagcttatccggtatcgttccggagaaaatcgtgcccgtgtccagatccgcaaaataccagctgttatcatctgcctgaaaatacaccgctgtcatcggcttttccccgcatcccaccagacagaacgtaacaagtaccgccagcatcatgagccattttttcattgtcccacctcctgttttctgatcttcattgtttctctttgctgaaatatctatgcaccggattttctttcaggcttctgtcactcatatctgtcacaacaaaaaaggtaactgtctgattttccagttacccacattctaccataattctttcttcttttgtctcataatctgtgacttttgtctttcgattttctttcttccagctttctttttacaatagccaatatccagctctgcctctcttcttcactctttagcttccgaagttccctttttctgcgcatcgcctctttccagatctcatcccatatttcccgacattcttcacctgtcagatcataagacggactgcgtaagattttcagcacctgtctgcaatatctttgataaagctcatttacttttcgactgctgaaaatcattcttttttcccactcatttatttttattccctttcggaagtgttatcttcatcatctgtaaattctactacttcttcaggattacaatctaaagctttacagattttctccaacgtatataatgtcatatttccattcttacgcagagtatctaatgttctgttatcgattccccgatgaagcagttcgtactgcgtaatgcacttttccctcattgtcttccacacgggcgcgtagcttataattgtaatcaccacctttaccgcacagcgttattcgccattttttcggttcgcactgtctgtgttcttacaattatatttctcctgtccgacaattcatattgtgcatattttcacaattgcaaaagcaaattatgtatttgctttttgagggttttttattatcttttggctatttgtgttggttgtcttattatgcgtaatgttttattttatgtaactattcagtagccattatcccgcgaggtgttttggcataaatatgccaaaatcccgagatatacaagcaaaaatgccatcaccgaaggtgattttaaatgcatttttgctcgtaactgtgaaggtactgaacagttactattttataaaaaagggtctgcaaattcgaattttcttcttcttctttgcagaccctttttcagatacttagaattctacttttacagctccctgtggacggatatgcataacatatgcagaaccctctcccagtgccttgtcgatatattttgtaaatccttctgtttcttcttttggaagaaatgcagcaataacgccggcaaatcctcctccgtgaacacggcacacaccacgaccgatcttatccagatacagtttggtcaaagccagcgcaaccgtgatggactgctcatccggagtctcgttgcagtagcagttctgcagccatttccaggaagaatcaccggactctgtgattttgttaaagaaggtggcaaaatctttcttttccagtgcttctacttctgcatccacacgtttgttttcttcaaagaagtggaatgcacgcagaaccgcacggtcaccggcgaattcacgaatagcttttacattctcaatcacatcatcttccttgcactgttccagaacttcttttccgaagtattctgctacttttttcatttcattcggaactgcagaatactctgcactcagatctgcatgaccttttccggtgttgatgataaccagatcatggcccatctcatcaaaatcacatttgatctcacggatggccggattttcgatatctgcaaaatcaatggtaatcataccgccaacagcgcatgccagctgatccagaaggcctgagcctttcagccagtatttattttctgcatactgtcctgcttttgcataagtaacaacaccaatctttccttcgttaaacaggtgatccacaatgacacataccagcatctcaaaagatgcggaagagcttacccctgccccaccgatcacattggaagttacataagcatcaaatccttctactttacatcctttttccagcagtcctgcaaagataccctttaacagcggttcggttcccgttgttttttctgtcggggccaagtcatccagatcgatcaccagatgctggttatatgtttcactgatcaggtttacagtgtgggttccgttgggtgctgctgctgccacacaatccagatgtacacttcctgccaggacttttccgtggttatgatccgtatggtttccaccaatctctgttcttcccggtgctgagaagaattcaaaggctttatctccgaattctttggcaaatccatccgctaccagctggtatcttgctgcattttcctctactctgttctctccgtacatctgtttcaacagagcaactgcatgttcactttttactgcttctgctacatttgctgttttcatgtttcttctccttttttattttcacatactgatattgactatctgctaattatcattataatgagaatcatatagcatcacaataactatattagcttactttataaatatattgaggttttttcatgcaattacagttagacaacaacaaaaaggaattaaagtctcacggaacctatgctttcccggtcaacgtaagctacgaacagctttcccgctatgaaagaaagtcttttctctggcactggcataaagaaattgagctgacgattctccttcagggcgagatgcaatatcaggtcaacgataccatctatcacctgcaggccggtgaggggcttttctgcaacagcaaccgtctgcataccggttcttcctgtcatgattccgattgtatctatatttccacaacctttcatccccgctttctttacggatatgaagacagcgtgatccagaataaatatctgaacactattacaaagcatcccggactgcatagtctggtattttctcctgacattccctggcaaaaggaggtgctggatgaactgtctgccatctggatgctttccaaacagccctccgccacttatgagatggaattgcaatggcgactcacccatatctggatgtttctatggaaccacctttcccatcagacaagcagttccggaaacagtgaatctaagcataccgatcgtctgaaaaatattctgatgtacattcaggaacattacgcggaaaaaatcactctggctgatattgctgcaactgcaaatatctgtcagagtgagtgttgtcgctttttcaaaaaacatatgaatgaatctttatttgattatcttctttccttccggattgagaaaagccttcctctgttggttgaccagcagctgtctattactgaaatcagtaatctatgcgggttttccagttcttcttattataccaaagtatttcgggaacatatgggatgcacaccaaccgcataccaggccggacacttcgtctgatcagacgacatcagcggaacaaacaataccgtaacacgtgaaagatccgtatctatgccgcaactatcatccaggacagcaacacagatacggatctgttttattttttcaggtcatctttaataatgttttctacttctttggcttcctcgcggatattttgaatattcttgcgaatctcctgctcttcttccaggatccggggatgttcttccagttcttctttgataaacatcaggaggaatcccacgaaaagcaatccacaggaaacccagatggttcgttcatgtagcaggaggatcagatggcctccgacagcggcacctactgcaaacattgcgatgattccaagataatgaccggctttgtacagtttttctttatcctttgtctttccatagacacacagagattccatgccgcttcggatattgccgatacacatggtgctggcaaatgcatagccattgactttacggaaggtctgcacctgcatggcacaggcaaaggataccatggcattggccagaaggttgcatgctgttggaaggaatccgaccacaagcagtaaaagcatttccatcagtaaaaccaactgtctccagtgaatcctctgtacatttttatatttttgccggatgccttctgccactacgattcccatggcaaaaaatcccaatgggatcaggtaatggatcaccgtggaccattttcgttccacaaggctctgacttaagagcacaatgtttcctgtctgtgcattggcaaatacctcgcctctgtatatataggtataggcatcctgcaaaccgccggatatagataaaaaagctgctgtcagaaaagattctgacatctgtcgccctgaattttgtttcaatgatcttccctcatttctacacaaccttctgtcttattctcccagttgttttatttttccagcggtaaagtatactctgtcaaaaacgatatttcaagttttttattttatacattactgttttttccagcattgatcctgggtctggatctcttttccttccttcgccgcttcatccatcatcagaaacagataggtgtcctgcagtgcctcttccagcggatacacttcctttcctgtctctacatatgttttcatgccttccatcatctgggcaacagcgatttcctcgtctgtcagacgaagatctctgtctgcatatggatttctatacagaatctctccgttcagcctaagacttctcattccgtagccttccaggttagaatactgtcccagttcgtctctctggatgcttccctggaccggataaccgtcctgaccaagccaggctgcctgctgatcatgaacttctccgcaatctccctgaagggtcagatgacgggtacggaaatagttaaaatactgctcaccggcaaaatcaaagaacccaacctttccatccgggaagacaaattctgcacgttttcttgtgtccacgatggttttttcccccttatgaaggccctctcttccgcagtgataattcaccggaaaatcataggttctggctgtgatcctgcagttttccatacctgtgccgagtaatcgtcgcatcacgctcatgccatggtaatcatgggcctgggaaatatccagattgctgatcgttcccagtttaccctggtcgatcatatggatcagtgcctgataataaggctggaagcaatactgttctgccacctgtacttttccgttgtatttttcttttgcctgataccaggcctgtaattcctctactgttgctgccggcggtgtctcacacagaaccggaattccctgttccatggttttctcggcaaatggaagtgcagcaccgtattttaacataaagactacacagtccggctttgttgccagaaattcgtcatagtctgtatacaccttccccgggaaatttttctcttcccgctccctgctggactctgaatgcacatacactgccgatacttcaaattcttctcccagtgctttcattacacgcacatacatctgtgctctccatcctgttcctgctaatcctactttcatgtaaaaatcctccgtcattgtataattttatgtagtaatcaaattgctatctgttcaatattcccgggaataccggacagcaactgacttttctccattatatcacactttacattttattgtgcatttttatacaatatacggatcaaaaaacactctctttttctatgaccccaagtaaaatctgcaaagatttctttcgacaataatattttcttcatacaaaccatcgagtgaaacatcacttttcaggatatatatcaggtacaataccgaaaagtcctgtccgtaaatatccttgcaaaaataagtccaagaggcagtgccactacaatcaatattgccgcagccagccaggagaccgcttcatttagggacatgactccaaggttataaaatcctcgataaaaatacaatcccggcaccataataacaattgaaggaactgtaagtgaaattcttggatatccgttgttttttttgatcagcgacgccagcagtccagctgccagtgccccggtaaatgcagctacagccgccggcatcccggtaaaatcgatcagggacaaccgcagagtattggctactgctccgatcatcgctgccgtggaggccatgggaatagaactgttaaacataatagaaaatccaagaacaccgcaaaagctggcacatagacgaaaaatcagcctggatgccgttcccaggtgtactgctataaaatcctccggctgtaatttcaggatcattgccgtgatccaggctcccatggttgccaccagtatgatgatcaacgcataggtcagtctttccagaccggaacgcaaatccagtttcgccaggtcgattccgctggtgataaaaggaaatcccggaatgataaataacatggagcagatataccctgcctcatgagccgccgatatatggagcaggctttccgccagattaagacagattgcatagatcagacatgccgctgatacggaaactgcaatatttaagaataaggtataatgatgctttatcatcctggtacggatgaaattaccgatacctgcggcaataaaggcaaacagcatctccaccggtcctccgccgagaagaaacgtaaaagcgccacacgccagcgccgcagccactcccagcttccagggcgaatagagcgcatgaatctgttctatttcatccagacgtttgtggatctcctctcccgtcagctgtttctcgatcttcggaaagttttctacaaactgctccatccgataaagtttggatgtattgacccctgtattggctatacttaaggactgggaaacacaatctgtcccgtcgaagcagttaaacccgatggacatcagtccaacatccacggtacaggtcactcccagctctttggacaaccgattcatagaggtgcgtacacgccaggcaccggttccacaggaaagcatcataagtcctaccctgccgatcacagatgctttttcaatcagatccgcctctgcgatcagcacattgctgtctgccttggcataatcatgccatggaatttccatatgatttttttccataatatccgtatattccgatgtctgtcttaccacactttctttatcagccataaagaatcgcctccgccttcgccacatgacgttccagattttttaaaaagtgagagtttggcagaaaaataccgatctcgtcatatgttttattattttccagcaatgtgtcctggccgtaaaaaacaaaagccatgggcagattcttttccagttttgccatcagatcccaaacagctgcatatgcctgagcttctgtttctttcttttttacagtatccggcagttcatgaatcaataacacacctgtatttttttcaagaatctgctgttccacttccatatggctgtcataacaatgactgtatcgataagcctttgcaaaatacatttttcttccgactcccagacgttgatagacctcttcgaaatgtctgtactctttttcatgagctacactactgtattcaagaagaagtctcccctgcccgtcggtcatgatcacgggatttttgattccatctgcatcgaaacgataggggatcagacatgcatttcgcagaagatcaaacatggtattccggcagatttccatcaggaatgccgagagatcacgatttcgataagccgtaaataaagcttttgaaaattgatccggcgaaaatacctcatctgtttcttcgccacataaacacgaattgcagaaggtttcctgaagtttttcgcaggcccatggatcttccagaatcttttggaacaatatttccgttttttcttctcttggaaaaatcatactttctttcatattcgctgcctcacttttcttgctctttttattccgaacaattatactatggacacaataataagtaaaagctataatagatatgttatatattattttttgatatatcagaggtacgcccatgaacgttaattttgaatactataaaattttttattatgttgccaaatatggcagtttcacgaaggctgcccgggcactgggaagcacgcagccaaatgtaacccgggctatgaactgtctggaacagcagctgcacaacactttatttatccgcaccaatcgagggatacagctcactccggaaggcgagcagctctacacccacgtttctgttgccatggctcaattatttatcgctgaggaggagttatctgacagtgcttctctgacccacgggagcgttactatcggagccacagagacggcgctgaatatttttctgctttgtaagctgaaggctttccgtaccgcctatccgggaattcgactgaaaatctataactactcttcaccccaggctatcgcagctgtaaaaagcggaaaaatcgattttgctgttttatcaacccctgttcctgcggaaccgccactgcaccttactccgctgcagtccttccgggagatccttatcggtggaccttctttttccgctctttccgaaaaggaactttgtttttcagatttgaagaaatatcctttcatctgcctaggaagagaaactgccacttttcagttctataatcagctttttctttcccaggagctggaactcatacctgatactgaggctgctactacagaccagatccttcctctggtaaaaaacaatctgggactggcatttcttccggaacctatggctttagaatctctggcaaaacaggaggttcttcagatcgcaatatccgaaaagctgcctcttcgccacatatgcctggttcatgatcatcagcaccctctgaattccggagcaagagagctgaaaaaaataatcctgggtgaaaggatggattaatatataccttctcccagaattatctttcaacctgtaactgttcagtatcttcgcagtagcttctaaacagttaccccagattcttacttgccacccagcagttccagaatctcttctctggaaaaactgccgcttcccatgtcctcgccactcagtatctgatccgccagggcatgttttttctcctgcagctttacaatattttcttcgatcgtatcttttgcgatcagtttgtagacattgactacgtttttctgcccgatccggtgggcacggtctgtcgcctggttctggactgccagattccaccacggatcgtagtggatcacaatatccgccgccgtcagattcagaccggttcctccggctttcagggagatcagaaaaacagctgttgggttatcttctttattaaactcctccaccagctttgcccgcttttcctttccggtcgaaccggtcagcatatagtacgccgtttcttcgttctccagccggtctgccagccggatcaacatcgtggtaaactgggaaaatacaaggatcttatgtccgttttccaccgcgtttcgaatcagatccacacacatctcaagttttgccgactctcctttatattcttcaaaaagcaatgccgggtcacagcagatctgacgcagcttggtcagttcggataagataacgattttggaagtattgaattcttcctcgctctgtttatctaacagaagtttcatccgttttacatgcgcatcgtataacttctgctgctctccttccagacgggtatacatattttcttccagtttttccggaagatctcgcagtacatctttcttcagtcttcgcagcacaaaaggtcggatcatttttcgcagccgttcactggcttcctcgctctcatgctggacaatctgtacttccagttccccacggaagcgggaataactgtataaaaatccgggcatcagataatcaaagatgctccacagttcactcagccggttctctaccggtgttccggtgagggcaaaccgagtgtctgcctggatctttttcacagcttttgcagcctgggtgctgtggtttttgatatactgtgcttcatcgatgatctgacagcggaaacggtactttttatagaaatcgatgtctctgcggagcagatcataggaagttatcagaatctctccctcatctgctgcttccagaagtgtgcgacgctgcgcagccgttcctacgatcattcttactgcaagccggggagcaaaacgttccagttcactgttccagttatagaccagggaagccggggcaacgatcagcgcattccgccgcagtcggttatctgagctcttcttttcccgctgccgtccctcattctcaatatcctgctctttttccaccggctctttcttacttttttcctgtatttcacgttcctgatactcggaaagcagatagcagatcacctgcaacgtttttccaagtcccatatcatcggcgaggattccgccaaatccattcgcactgagcgtttttaaccacagaaagcctgtcttctgatatccgcgcaggatcggttcaagttccgtcggaatctcaaaatcattgtcttctacagttttcatgttacggatcagagaacgaaaattcttatccctcaccgaagaaatcaccggattgtcccgtaattgctgatctatatacaacgcccggtaggtatccaccggaacgctctcctgcatcagctgctgatctgtcagctgcagcgtttccttcagatctaccagtatatccagaccactgtcttctttctgaacgaagcttccgtccttcagacgataatattttttccttttattataacgtgacagaatatcgatcagttcctcttttgacatttctcccgctgtcattttcagctgcatcagaccactttcaatcgatactcccaccgcaactttcggtgacggatgcacctgcattcctttcagcgtatctgatatatatacctcccccagctgctgaaataccggaattccttctgtcaggagatcatatattttatcctcatccgtaatcaccatagctttctgtcgttcgtcatatgcttccccgtaccgctgaatcacttcccgtactgccgcttcttttccaagatcccgcagtgccacatccctggtctcatacagactgtatacttttttatcatattgcacctgcggtctgcaggtgatcatatctgtctgtggtgcatccagatagatcgaaaactccggaatcgccacaccatactgctgttcatcaaaattttcttttgtacattcaaaacactgttccaacgccggaagaagttccatacaaaacaacggaacatctgtcttttccacaaaaatcttccgttccgggatctccgccatgcattccaggaattcttttaccggttccattcttttcatcggttccatcataatctgattacccgaaaaaaatatattgtatctgtttcctcttattcccggcaatcgattgatacttacttcaattccatccgttttccccagaatcttcagcgttctctccggtatctgtttcacaattttccacggcttctcatccatgtaaaacacggatgccaggatctcctgtcccttcatcagctccagaaaagtttccatatcattggcagacaaatcaatctgtttttccctggcattcccataaaccgaataatagctgtgatatcctccataccgatattcatttttctctgcccactgcacaagaaaagataccagtggtcgggactgtggaacgaacgattcaacagcatggataaactgcagatttttcccataaaaaactttctcatggttttctatcgctcttgcaaaaccgaaaacatctttcagtacatacatccggttgattccaagcttgaagctgacggtgatcccggtgttttccacaaccatatgcggttccagacggacttttccacagatatccccctgaatcatgggaagacttttcaccagtgcacctttttgaagcagctgctggatacttcctgttgtttttcttgccattcccttttgtatacccggtatctgcatcaaattcatctgacccgtccgattctttgtctcatagtaatatctcagaagaaccgccacacaatgcttacatatcccatcatactcccagaaaaccggacagctgcactctgactcaacaagatcttcccagaccgtattccacatcagatacacatggtatggtgtactgcggcttccttccacatccgcttcgataatcacattttcatccgcatgaacaccttctgcttcttctatatggaaacgcaatacttttcctctgttataaatctgcatccctctgctgtatgactgactgccggcaagatttctgatctgttctctgaatgtcatctccctgttccttccgcctttattattttgcaagttttctttcttattttgatatatttccttcattttgtgaaaatctgcgattatctttcattcataatactctatgattgattgtaatacgggatggatgattgcacaatggctaatataataaaagcacagtaagagttgacattgtatagcacatatgctattctaagtttagacatatctgggaaacaattctaagaccattcggttatctgattccccatatgaaaaacaaaaaaacagacgaaaggatgaaaagcgatagcatgggaaaaaaagctgcaaaacaaatcgattttgcccggaagcatgaagaagatttgcggcgtctcaggggactgagattgctggatgatgatttcatgcaaaaggtattcgaagacaaggcatgtacagaacttttgcttcagattattttgaagcgagcagacctgaaagtgctgcatgtaaacggacagcaggatatcaagaatctgcaggggcgttcggtaactctggatatactggctgttgatacagataacaaagtatacaatattgaaatccagagaagtgataaaggtgctgcggtaaaacgggcaagatataacagcagccttattgattccaatgtaacggaacctggtgaaaaatatgaaaatttgtgtgaatcctatattatttttatcacggaaaatgatataatgaaagaagggttaccgatctatcatgtcgacagaacggtaatagagacaggtaaattatttggtgatgaagcgcatatcatatatgtgaactcacagatacacgatgaatccgcgttaggaaaactgatgtatgatttttactgtacagatgccggaaaaatgaattatgaaattctggcggaccgggttcggtattttaaagaagatgagaagggggttgcaactatgagcagagtgatggaagagatgagaaatgaaacagaacgtgcaaaagcgatcaaagatgcaaaaggaatgctggagtccggtaaactgacatatgaagaaatcgctaaaatagcagaacttacgatagatgaggtcagggctttggataagaaagtgactgcttaaatcaataattggaccaacggatcaattattgatatgtaattcaagagaaaggaacttgtatgactgtttcaattcaggcattgcaagttcctttttattcatgaatatcacatcttaatctttaatcaggactttccatcccgtaattttatttttctaccacaacctcaccattcggccgtaagatctgaaccgtaacatcccctttttccagaatcgttgtccaactcatgcccgggagtagctttggtatccggatctccttcttgttttctttgtcaagaaccagaagactgtatccctgaactgtataactcggtaaattgtttctgcaggttatttttatctgagagccttctttttcaaggattaccggttttgctgtaattgtcagttcctttatatattgctttccggttacccaaagttctaccggacgaattattcctccatcgttcgcccagtcaaagcttcgatttaccggaagcatatccggcgaaaaacgattatctgcttctaccgtaattatattttttccctcttttatgtattcggaaatatttactgtaaaaggtgtatatccggaattcttatgttctcctgccagttcgccatttacatatatttttgcatcatgatatgcactgtgaaagtataatcttacacatacggaaagccattcttccggaacttcaacttccgtcttttcgttctctgaaatgatattccgcgcggggaaatattcccacatccgtcagatacagcctccttaccaatggatgttctacataatcctgaaaagactccgtcggcagcacgatcattttctcgccccggaatccatctcttttccagtcctgtaattcactcataccgtcagccctctgtctgttcctgctctgtataatcctccacctgtcctaccacatccagaatcggatgggacatcaaaaaccggtaaaattccagtgcttcgtccgcgctcatatgtacttcccggctggtcagccagtattttaagccattgactaccgtaagtgtatgaaattccagaaagatattgatatctctcagaccttccaatttctgaagtgtgatcttatgatttttcatcatctgtctgatcagcttgcgaagcttgcctgccagaatctcttcaaacccgttctgtccggtgacctcaaacgctttctgataatactgctgatctttctccatcttccgaaacagcagatagattgcttcccgttccatcccgtcttccaccatctcaaaaaccggccggaagacctcttcttccagaagccactccatcacttcatatttgtcctgaaaatagttataaaaagtaggccggatcactcccgcctgctctgttatcatccgaatggtaattttatcaaatgagcctttcaacatcagttctttaaagctttccgccagctgatgtttcgttgcttctccttttcgttccatagacgtctctccccgtgttatcctttcggcttattttaacacaaaaagattgtctatggaaatttttacttattttttcttgtaattactgtagcctttgtgaacatacgggtgctcttcccacagtttgtctgcggcttctttccactgacaggcgtagtccgcacactttccgcagagatgttctacagtctccggggactgcagatcggtggattttgctccggtctgttctaccatctcctgcaggatctccggattctccagcatcggacatggtcgcaggtgattgttattaaatggctgatgatcccggtaagccataaacaacggctgtttcagtgcttctaacagggacacttctttgatatttgcagaagagtaatggataaatacacacggttccacatctccattggcattgatatgacagtagtttcttcctccagcgatacagccacccacgaattctccgtcgttctggaaatccatggcataaatctgtttgcctcctgtagcaccacggatctcgcggactctgtgatacatatattctctctgttcttttgttggaagcagatccacagtagcatcgtttccaaccggcatatagtggaaataccaggtgaagcgacatcccttttcgatgatcatatccaggaattcatcggaggttaccgtctcgatatttttacttgtataacagatcgatgttccgaagatcagtccgtggctctttaacttgtccatggctgccatgactttatcgtaaacacccactcctcttctgaggtcgttgacttcctcaaaaccttccaggctgatcgacagagacaggtttcctacccgctgcatctcctcacagaaggcatcatctaccagggtaccgttggtaaatgcatggaattcacagtcgtaatgtttttcacacaatttaatgatatccgctttccgcaccagaggctcgccgcctgtatacatataaaaataaatacccagttcttttccctgtgtgatgatccggtccagatcttcataagacagattcagtttgtgaccgtactctgcagcccagcagccggtgcagtgcaggttgcaggcgctggttggatccatcaggatcagccacggaatattgcactgatgtgtctctcgcatcgcacggatcgtttttgttccgtgaaatgccgcttcaaagccaagattcaatgccgtctgtttgatcacgttcggatggatctcatccagtgcacggttcacatactgcatccacttggactccggatcccgaatcaggtttcttgctccttcatatgattctgatgggaaattatctcccatgaatttttctgtcagatctaccagctgtaaaagccctttttctctgtctttttccacgtgttttaaggtcagctcaatcgccttcccgaatgcggctcgtgtcgctttatgtgttaattctcccatactttttctcctcctttgcgcttttgtgcgttcctgtttttctattattttatctttctgcaactaaaataaaaatcttcatttccatgaaactgttttatttttaacgacattttctgacttttgtcgcattttttcggatggagtctgaaagggcgcaaaaaaactgctgtcggaacactttgatactgtgttctgacagcagtccatatcatttatgcctgttttgcgtctcgttctttatctaattttacatttctaaagtaaagaagtatgtcgatcgtaatttcagctatatttagaaaatagaagaaccatgcaagataaaacagccaactggtctctacgcccatgccgagttgcatgaatttgcgagcgataccgaatacataaccgatccagataaagcactcaaagaaaaggctctttcctttcgcagttctggaaacccatgatttccggatggaaatcggccaggacagtccaaagcaaagaatcatcacggcttccatcaggtcagtaatcatttccatatccatcgtagtatttctccatttcttttgcgttatttaattagttcttttttcctttcaaatattccgctcttccctcttcgtacagattgtttccttcactgtcgatgataacaaccagcggcatatcttccacatacagtttacgcagtgcttctgctcccagatcttcgtaagcaatcagttctgcttttttgatacattttgccagaagagcgcctgctcctccgatggcaccaaagtatacaccgctgtattttttcattgcttccacaacttccggaagacgggcacccttaccaatcattccacgggcacctacggacatcatcgtcggtgcatatgcatccatacgaccgctggtagtcggtccggcagatccgatgacctgacctggttttgcaggggtcggtcctacatagtaaatggtagcatcggttggatcaaacgggattttttctcctcttgccagtgcttcgcacattcttttatgtcctgcatcacgggaggtatagatcgtaccggtcagcagtacctgatctcctgcgtgaagtgtttttgccagttcctctgtaagaggcagtgttatcttcttagccatattagatcacctccgttttgtgacgggttacatgacagttgatattgatggcacatggcatacctgcgatatgggtaggcatggtctcgatattcagtccgattgctgttgtctttccgccaaatccctgtggtccgatacccagttcgttgatcttttccagcatttctttttccagatctgcatagaacggatccggattggaggaatccagtggtctcatcagagctttcttggccagaagggctgctttatcaaaagttccaccgataccaacaccgactaccatcggcgggcatgggttaggacctgctgtttcaactgtctcaatgataaaatccttgattccctgcagaccgtgagaaggtttgaacatacggatcgcactcatgttttcgcttccgaatcctttcggtcctacggtaatcttgatattttctcccggaacgatctctgtatagatcatagccggtgtattgtcaccggtgtttccacggcgaacaggatcttttactacggattttctcaggtatcctttgtcgtatccgcgacgaacaccttcgttgatggcatctgccagatctccgcctaccatatgtacgtcctgtccgatttccaggaatacacatgccataccggtatcctgacagatcggtacacattcattatccgcgatctcaaagttctcgatgatgttgtccagaactccttttgcaatctcgccgtcttcacaggcacggcagtttttgatcgcgcattttacatcttccggaagatgctcatttgcttcgatacaaagcttttccactacatctgtgatctgctttacgtctatctctcgcattccactctactccttttttcgtaaattttggattatctgtaaccagacgaggagtccgcctatgttccccctcgtctgatgtacgttcacttacttatttacagattatctttcgtgtcttgcataatgtggaagcagtaacggggaaacatgatctgtttcaacgcctgctgctttcagctcgtcatcgtatgcttttacgtgatccaggttcatggtgcccagttctacgtctttgcattttgcagctgctttcttacctgcgtttctaccgaatacgataacatccagcagagagttacccatcagtcggtttcttccgtggattccgccggctgcttcacctgcaactaacaggttcgggatttctttggtaaatccatctccggtgatttccagaccaccgttctgataatgcagtgtcgggtagatcaggatcggaacttttctcatatcgatgccatagttcatgtacatacggaacatggcagggattctcttttcgatggttccttctccaccaaggatctcgatcatcggagtatccagccatacaccttttgctccgcccggaacatctacgccacggccttcttcacactcgcggataacaccggaagcattgacatcacgggtttccagcggatggatataagcttcaccatttgcattaaccagctgtgcaccaacggaacgaactttttctgttaccagtgcaccaaggatctgtgccgggtaaatagctccggtcggatgatactggatagaatcctgatataacagggaagcacctgcacggtatcccagtaccagaccatcggcagtagcaccgtaatggttggatgtcgggaatccctgataatgcattcttcctgcaccaccggttgcgataactactgtttttgctcttgcaacagagtagtcacctgtttccatgttcagaagaacagctcctgcaacctgacctttttcatctttgatcagttctactgctgatgtaaattcaacaaccgggattgcacggttgatcacttcatcacgcagagtacgcatgatctctgctccggagtagtcctttgcagcatgcattctctttctggaagttccgccaccatgggtagttaccatagttccgtctgcctgtttgtcaaattcaacacccagctcgttcagccatttgatagcatccggagcttccataaccagtctttttaccagttctggttttgcagcaaaatgtccgccaccgaaacagtccagataatgctgtaccggtgagtcattttctttgtctgctgcctggattccgccttcagccatcatggtgttggcatcaccaatacgcagttttgtaacgatcattacgtttgcacctgctttgtgtgcttcgatagcacaggaagaacctgctccaccaccaccgataacaagtacatctacatcgtagtctacttttttaagatctacattgtcagtcatcaggcggcttgtggaatgaagcatatcagccagctccagaggagctttctgacctttgttcggtccaactttgatctcagcaaatgcgtctgggttataatctggatggaattttttcaaaagagcgtctttttcgtctgctgtcagacgtcttggctctgttgccatacgctgtgctcttgtagcctctacctttttgatagattccatcatattttccggatatggtgcatacatattttacgccctcctatttctcaatatctctgttgttgtaaagttcttccatttctgtgatcggtttctgcatgatctgctcgatcaggtcatcgtaagcaccttcgtggatctcttccactctctttgtcagatgttttgcttccggtgcaatatattttcctgtgagacgtcttgccagaagacctaccatcggatgagaaataccagccgggcatcttacagaacagcatccgcagcctacacagtcaaaggattcttctgcacatttctccagctcacctctctgtgcgtatgcgatatactgcataacattcagatcctgtgtacatgcttttgtacatgcgttacatccgatacagctgtagatttccggatacagttccatcatgatctgagcgttcggtttgatctcttcgatatcgtatgttctcttatccgtcgggaagaacgggatacttgccacatacataccttcctgaacctgtgtctgacaggccagacaggttttcagctcgttgtcgcccttgattctgtagattgttgcacaggctccgcagaaaccatgacggcatccacatcctcttttcagagtgtaaccggcatactccatagctgtcataattgtcagttctgcaggcacactatattttttaccgaaaaaatatacatttaccattttttccatttgtcggtaccagtcctttcttaatactcgttaggtaattcgtcgatttcatcaaagcggaataccgggccgtctttacatacgtacttggatccgatattgcaacgtccgcatttaccaacaccacatttcatacgaagctccagggttgtgtacacctgttctttggtgaatcccatctcctgaagaccagccagtacgaatttgatcatgatcggcggtccgcagactaaagctactttgtcggtgtcaaatccgatctctttcagataagtcggaacaaatcctacatgaccgtcccagccttcctgttcacggtcgatggtcagatatacgtttacaccttctgctttcatccacacttcctggatctcttttaactgaaccagatcgtcagcggaacgggatccgtaaaggatgtctacagttccgtagttctcacggttatccagtacgtagttgattacagaacgaagtggtgccagaccgataccgccggcgataaacagcaggtttttaccctttaattcggtttctaccggaaaatggtttccgtatggtccgcggactgtgatctcatcacctacctgcaggctgtgcaggtagtcggtaagcataccacatttcttaatactgaattcctggtactctttattggtcggtgaagaagtaatggaaaacataccttcacttacacccggtgcacataccatggcacactgacccggcatatgttcaaataattttcctccttccggagcgttgacacggaatgtttttacatccggtgtctcctgacggatatctgtgatgataccaacctgagggatcagggtatccagcgtgtaatttttatgacaggtacattcgctcattatttgtcacctctctgtttttcaaatgctttgattacttttacaatatttaaggatgccggacatttttccacgcaacggccacatcccacgcaggagtacataccgttgttatttgccggatagtataccagtttgtgcataaatctctgacggaatctctgcatctggctggtacggttatttccatgagccatcatggtgaaatcagagtacatgcaggaatcccagcagcggtatctctgtacaccgtgtccggtatcatagtcttttatatcgtaacactggcaggtcggacatacgaaggtacaggtaccacatgccagacatggtttatacagttcttcccatacaggagagttgaacttttctgtcagtgcatctccgttccatccttccagagacagatcggaatatggcagtttttctacgatcgcacgaatagcagttttttctgtttccagtttttctgcatctgtgccgtcagcttctgtcaggaggctttctactgctttggtcagtgcctcacccttgtcagtcagggctttccagtacagttcgccgtctaccatccaggtagctacatctgctgcaggttctgcacagtcgatgccgaatactttacagaagcaggattcttccggctcatgacatgccatggcaacgatggttccgtgttctcttcttgcagcgtagaagctgtcgacaggatcacttaagaatacgttatccagaactttcacaccctggatatcgcaggctttcataccaaatactacaaaattctgctctttcagcgcttccggctggatgctcagtttctttccgtctctctgtacagtatacagattttcactctgtgggaagaatgcgtctttgggagattttactgttttcagggtctccagggatacttttgcatccggagtccatgctttataattcacctgtccgcttacttctaccggcagatataattcctgattctcggcaatactctggaataatgccgacagattttcttttgctatcttatacatacattatcccctttctgttacgatactcggttccgcatcgtcaaatgtgaagtttgtcagcggtcctttggaatcggtatcttcaccggcctgatattctccatacagttcatcgatatctttgataaatttgcggttgaacaggtgaagcgggataccctgtggacatactctgctgcactcaccacagtctgtacatcttccggctacatggaaagcacggatgatatggaacatcttctcttcaaaagagtccacatttgctttctgggaactgtcaaatttattgctgtcaaaaacacattttctgcagctgcatgccggacatacatttctgcaggcgttacaacggatacatttgctcagctcgctctggaagaaagcaaatttttcttccgggctcatagcttcgattcttcttacttcatcaaaacgatctgcatctttggtgtccttggactcgccgatgatctcgtcatagatctgatgttctttgcctttacatacatgacatctttccagcataccgtctttgtaagcacatgtcttctcaccgtagatagtctggattgtcagtgtctcggcatcgtctgtgatctcggcaccctggatggactgaatacctttgattccctgttttttgatcttttcgatatctagttttcctttacatcccacaccaacgatgtaggctttgtctctgtctactctgtgctctttgatcagctggttgaagctgtatgtatcacacggtttcagacagaccatggtctttccttccagtttggaagcttcgatcatatatttgcttaagttagctccgcagaatccgttatatacgaaatctttcagagattcttctgtctcaaagtacgcaggttccggattgtaaggcaggtctccggctttccagccaagaacccgggctactgttccgtctgccagcagttctttcgcacggttgattaattcctgcatcttatatcctccaatctaacgttcttaccaagggaatggatcttttccacgaactcgttcatggttgtggagaattttacaccctctgctgctgatacccattctacacgggtacgtccgttttccacaccgatatagtcgagcatggagaacagcagtgtcatacgtcttcttgcgtaatagttaccggtgctgtaatggcagtctcctggatgacatccacacatgatcacgccgtccgcacctttttcgaaggcacgaaggatgaacatcgggttgacacggcaggaacatggaacacggatgatctttacatctgccgggtaaccaagacggctgcttccagccaggtcggctcctgcataactgcaccagttacagcagaacgctacaattttcggtctgaattcttcttttgcttctatcgacatattgcatctacctccgctataatctgtctgttagagaatccctgcagatccatcgctccggatgggcaggctacggtacatgcaccacaaccctggcacagtgcgctgttgacctgagccacacggcgggtttcacggataccgtggtcattaatttctttctcttcgtatgtgattgctccgtaagggcacacatttgcacaggtggaacatccgttacacagaagttcatccggttttgcggtacacggattggtcatcagtttgtcttttgccagcagtccgatggctttgacagctgctgcacctgcctgtgctacagtttccgggatatctttcggtccctggcatacaccggacaggaagatacctgcggtcggggactctaccggacggagttttgcatgtgcttctgtcaggaagttgttggtatcgatacttgctgtcagcatggttgcgatcttacgaacacccgggttcggctcgatggcagctgccagaacaaccatatctgcttctttcaggatctgtttgttatctaacagatcggatccctgtaccagcagttttccgtttggctgcggaatcacttttcctacctgacctttgatataatttactccatactgttctacggctcttctgtagaactcatcgaagttcttaccaggagtacgcacatcaatatagaagacagttacattgacatccggatatttatcacggatcaacatcgcatgttttgcggtgtacatacaacagatcttggagcagtagctctttcctctgtcatcggaacaacggcttcccacacactggataaataccatttccttcggaggttttccgtcggagagacgttccagatggccgcttgtcggacctgctgcgttcatgatacgttccagttccagagaggtgataacatccttgctctggctgtatgcatactcatcgtagttgtccagtttgatgatatcaaatccggtggcaacgacgattgcgccgtatttttctgttacgatctcgtctttctgatcatagtcgatcgcacctgcctgacatactttagaacatacaccacattttccggttttgaacttgatacagtgttcacggtcgatcaccggtacgttcgggattgcctgagcaaatggtgtgtagatcgcgcttctgttgttcagaccgcggttaaattcgctcggtgctttcttggatggacatttttcctggcatacgccacatccggtacatttgtccatgttgacgcttcttgcttttttccggatatctacggtaaagtcaccaacgaaaccagatactttttctacttcactgtatgtataaatatgaattttttcgtgagctgcagcttccaccatctttggtgtcaggatacatgcagaacagtccagagtcgggaaggttttgtccagctgggacattcttccgccgatgcttggctctttctcaacgatatctacttcataacctgcatctgcaatatccaaagctgtctggatacctgcgataccgccaccaataaccagtgcacgttttgttacaaggctttcgcccggctgcaacggtgtgttcaggtttacttttgctactgctgctctcatcaggatcacagctttttttgttgcctcttccatatctttatggatccaggaacaatgttcacggatgttggcaatttctaccatgtatgggttcagtccggctctctcagctgctttccggaatgttgcctcatgcatacgtggggaacaggaacaaattaccagtcctgtcagctgtttttcttcgatcgcttttgcgatcagggcctgtccggcttcggaacacatatactgatagtcttctgcatgaacaacacccggctccataagagccatctctgctactcttttcacgtctaccgttgctgcgatattacttccgcaatgacagacaaatactcctattctctgcaccagggttacctcctatatcttctgaatgcactgactaacaactgctgcggcagttccggatccagtaattccggaatctcatccggtgtcagataattctgacctttctggcgtactaccagctgtcttgctgcgtcgatcagtttacccggttttacatctctcggacaacgctctacacaggcaaagcaggagaggcatttccacagagatttggaatttaccagttcttcgatgttctcgtttgccacataggatacaaactgatgtggtttgatgtccatctcgttgaaagacgggcaggaagcggaacatttaccgcatttcatgcatttcaggggattcacaccactgatctctttgatcagttctgcctgttttttctcggtactcattattcagccacctccttgtcggatgtcagtgtctgcagagcttcctcttttactccgagagcttctgccagaagttctgtgaagtagtgaaccggcagtttgccgtttccgctcttgttcaggttgtacagacacagtggacaggcggtgatcagcatctctgcaccaaatcctgctgcgctgtccatgatattgttgcacatgtttttggacatgtctttttctttcagagaaatgtatcctccgcagcattcgttccggtatggatacacaaccggttcagcaccgatggcacggatgaaatcttcgataatggttggattctccggattatcaaatgccatgatcttgcccggacgaagaagcaagcagccatagtaagcgccgattttctttccggttaacggattcactacttttttctttaattcatcaaacccgatacggtcacggagcacttccagaaaatggagcacttcagtctcgccttcatatggctctgccagtttcatgtagttgtttgctctggtacggatatcttctacattcttcatatcatcattgacacgtttgatcacatgatgacaggcagaacaaagagttaccagatcctgacctttttctttggcctcattcagagcacggacggaagaaagttttgtggcaatctcatcagaaccaagtggatatacaccaccgcagcactgccagttgtcgatttcttccagttcaaatcccagtgcccttgcagatactctggcatatgcatccagatctcttgcttttgttctcagggtacaacccggaaaataactgtacttcatagttcctgtatcctttctttatgtaagtttcctgcctgtcggtcaccggttgcagccaacagacattcgttactgtctgcttaatccagatcgatctgtgcgatgactgctttcagcgcatcggcactcttatgtaactgttcgatctcttttttgttcatacgcatcggcactttaccctgaataccgtttggtccaaccagtgtcagtgtgcttaagcatacatcgtcaattccgtattctccatgcatcatggaagatactgttgtgatggaatcagaagaagctgacaggatagagcagagtttgcatacggaagcagatactgcgtagaaagtagctccttttcttttgataatctgtccgccggatttctgtacgtattcgagcatcgcatctttgtccacttcttttacttcttttcccatgctctttgcaatatcgtaatattcatccaggcttacaccggatacatatgcgccggtccacggaataaaggatgtgtctccatgctcaccaaatacataggcatgaatgttgttctgtgctacattgagatgttcggaaagtccgcaacgaagacgagcagaatccagaatggttccggatccgatgatctgattttccggaagtccagaaatcttggtaaatacataggtcatgatatctacaggattacttacaatgatatataaagcatgcggagccacttttacaatctccggtgtgatagatttcaggatatttacattggtctgtgtcagttcgattcttgtctgaccaggtttacgtgcgataccggaggtgataattacgatgtcagagtctttcgcatcctcgtattcaccggcaatgatggagatcgggtctctgaagcaggttccctgtgcgatatccatgacttcgccttctactttttctttgttaatgtcgatcaggacgatctctgatgcaacattctgattagataaggtatacgcaattgtggaaccaacacttccggctcctataactgtaattttgctgctcatagtgtctccttcttcctttctatttgtctattttttaacaattgtggcaaaaaaatatgaaatcttcgctttctatcgattagcttttttggattttctcataaaaatataagagttcacacttctccctccgctaagataagtatcagctcgattccatttggatatattataacgcattgataagattttaacaagtgtttttgcaaaattttatcattttctttgggggattgattgaaagaatctatggatcaggaaattagctggtatgaggacgcatggaggagggggcaggtcagggggcgtggacgtgggcagggcaactttaagctagccgctaacttcggctataattcacgagggtcagctgaccctcgcgaaagcctacgtaagcgtcggatcttaaagcttcccctaaccgcccacaaagtgtccacgccccctgacctgccccctcctccatgctgagacttcaaacgggtacatcgcgttcgctcgtttttagcttagacaccctaacagttatcgatttcataacagtattctctattattgcgtttcaaaaagcactgcattcggctcatctccagctatcgagagtatagcgcttacataatatattatctttcacctataacaccgtttccactcaaaatacagcgttatttcttgcgaaaaccagcaccagcctcccggttcgggggtggggcaacactttgtgggcggttagaggcgattttgagatccgacacctacgtagactttcgcgagtgccagctggcactcgtgaatgatagtcggagttggtggctagctcaaaacgcctctgcccacgttgccccacccccgaaccgggaggctggtgcgtccgtcttacgacaaatcctctcttctatttaaccttacatgaacgttctccaatatccaaccttacgctcattaatctccttaataatctccggttcaaccttgaagtttctttccatatccatcaatccattgatctcctgctgtacatcgctgacctgggtgtaacagaagccgcagcaatatgggattttcttgacggctgtagtaatatcatcaaaacgtttgataaaatcttcttttgtattgactttattgccatatccccatccggaatcatcgttgttgaaagcgattccaccatactcgctgatgatgatcggctgacctttgtactcgtagccgtttgccagagcagattttccgctgtggtatacttctgtggtcagaatctggtctttgtattcggtgtagcgtttgtacagagtatcgcccacttcttcataatcatgaagggtgataatatcggaaacggtgtgttcccatccgtcgtttacaataaccggacgcatagtgtccagactcttggtcagatagtataccgcttctgtaaagtgctgttctacttttcttgtttcaatctggctgacgccccaggattcgttcatcggagtccaggtgatgatgcatgggtggttgtagttctgtcggacaatttccatccattcttttgtaaattcttctaccgcataatcggtatagcgataggcggctgccatctcgctccatactagcatacctttcacatcacaccaatataagaatctctcatcttctgttttctggtgtttgcgcagtccgttgtatccaagggcatggatcttgtcgatatcctcgaccaatgcttcttcacttggtggtgtcagatgagaatccttccagtacccctgatccagaatcagtctctgatacagtggatgaccgttcaataaaatgtttggtccatcgatacggatctcacgcattgcgaaataagaaccaaccgtatccacgatctcccctttgtgagtaaccgcaaaatcaatatcatacagatccggttctgccggagtccaaacacggacaccccattccagtcccactgttccttcataggctacattaatggtggtctctacatgtttctgatttgccagcacacactgctttgcaaccgttgttcctcgaaaactaacggtagctgtgatcatcagatcgtcatccagatctttttccgctgctgccacttcatattccagtttcagtgcagcattttgcagatccggtgtcatttttacggatgccaggctgatcttcggtacgtattcactccataccgttttccagataccggtggtctgtacataccagcatccaaagttttcgttgatccatcgctgttttcctcttggctgctgggtatcaaaagagtcttctacttttaccgtcagttcattttctccgtcatgcaccagattggtaacgtcaaaagagcatcttgcatagccgcctctgtggcttcctgcataggcaccgtttacccatacttttgtaataaaatcactgccctcaaagtgcaggatataacgattgttctccagcttcacaccatctacgttaattgtacgatgataccagataaaatcatggcgggtttcatcctgaatgccgcttaactttgtctcataggtgaacggaacattgatctttttatcacctttgaattcctgataccatttctctttttccccggcattttcatcatcaaaaccgaaatcccaggttccgttcagattttcccagtcagttcgcataaactgtggtcttggatagtccttgatgtaacatttcatttttgctttcctccataaatgcttgtaaaatccctttccgtccttttgacgattttctcatacagttttattttctcagaaaatacatttttttcatattacaatactgtacaattttttcctttttctttgtgtagttttccctttgttcagacaacaactgtataaaaaacgtctcgtttctattttgcaaaaaaagatggtacggagttctccataccatcttttctatatttctgaaattttttatcttcccagcgccttcgccagcttccggatgtattccggggtggttccgcaacagccgcctacgattccggcaccgacttctaccaggtgtttggtgtgtcttgcaaaatcatctgcattcatatcgtaatgagcttcgcctttgtcatcgataaacggcatgcctgcgtttggtttcgcgatgatcggaacagttgccacttctttcatgctggcaactactgcttccagctgatccggacctacggaacagttcagtcctacggcagccgctcccatctcctgtaaagtcagaactgcttccacggcattacctccgtacatcgcgcttccgtctgcttccaaagaaagggtacagatcatcggaagatcgcagactgcctgtgctgcatccagtgcaactaccgtctcatccacgctcaacatggtctctgcaacaaacagatccactcctgcatccaccagggctttcatctgttcctgatatgcctcatacagttcattataagtcagggttcctctcggctccatcagctgtccggtggtggtgatatctcccgctaccagagcccggttgccgattccgtctttacagatctttaccagctttgtgttcagttcggctacccgatcctggagattaaagtttctcaggctgataggattggctgcgaatgtaggagcatatacgatctggcttccggcatccacataggcacgctgcagttcctgtaaaactgaaggattttcaagtacccactgctcagaagatatgcctaccggcatacctgcttttctcaggttggaaccggtggctccgtccagaattactaccccttttgctgtcagttcatcaaattgctgtcttgtcattgttttctccttcctctgtatatccaaaacactatttcagtattatcagcttttttatcttcccacggacttacagagggagtgtcccattactgtttccgttcacagaactcgatccgttctttattcggtccttcgataataaagaaagccacacccttttcccagaatggaagttcttcaattccattcgacaacactttatatccctgctcacagatccatgcataagcagcctgaatatctgtgcagtttaaagcgaagtgattgattgcgccttcaatgccgttgccaccttcggcgtaggtctcgatcatcaggtttcccagctgcaaaaatgcaacttttgcctggtttgcaggtacctgattcgtgtgcatagtctgaaatcccagaccttcatagaaccggatcgttgtttctatgtctgatgtaggaattccgatatgctggattcctgttgtccactgtgttacactcatcctctgtatcctccgcttttttctctataaatcttatttactcagcactgtcctctgctgctgtgtcttctgttgtagtgtcttcactgttatcctgtgaagaggtatcttctgtactgtcctgtgcgtcactggattttgtatcatcgctgctgtcggcactcttgtatacaaaagatacactgtcggtgactgtgatctgatcccatactttatctttgactttaatcttttcttcttttacccagtcttccagtgtgctgtcaaacagatccgattttctttctgaaataaccgtcttctctttgttttctgtcgcatcttcgtccagcatcttatccagacgtaccacataataaccgtcgtcgccttcgatcacactgtcagcaacttctccgtctttcagttccagagctgcatcctgtaccgcctcatccagtgtatcatcagtacttcccgctgtggtaaatgccggtgctgtcgcacttaaactgtcatctacctcttttgccagtgcatccatatctgcgtttgccacgtcatcggatgcttttactttatcaagtacctgctgtgccaggtcttttttctgggctttttcttcatcggtcagatcaatggtattaccgtcatcatccttttctgttccttctgtagaaacttttacaatagtgactcttgtctgatctttttcattggcgctgacctcggtatctacatctgcagtcatcggatcatgcatcttgctgcggatcgttaccagttccagatacgtaacaatatcgtcttcagatactgccagttttttcaggatcttttcatcgttatctttgataaattccgctgctgcttctttgatcgctttttcttcatcatccgtaatcgtaacgtcataatctgccgcatgtgctttcagtacatacaactgattaattgtcgtcatgacaccatctttggagctttccccgacagtttttccatcgtctcctttctgatcccacacattggatgcagaaccgctgacaccatactgtgacatcagcatattataataactcgtggtctgtgcctgctgatctcttaccatataacttgccagacccaatgttactttttcatctcctacagttgctacggtttttgttccatcaattgcttttgagcatccggacagtgtacctgctgcaagagcagctgccagaatcccacatgctgcggttttatttaactttctcatgttttcctccgttacccttttatgtactccgggagtacatttattcactaatagcatttattatagactatttccgcctatggggcaacttttttccttttatttcaatcttttttcacaagcgctcatctcttgttttcctgttctcaggaatttgcctgcacttataccagacactgcatgaccgtcagtaattcagtcgccttctcctgcatcggcactgcttcctttgcctttcggtttctcggacgatacagaaaatacggatttgtttcgactttaaactgcagttcttccggatactgattcaggatctccggtatcttcgctgtgtcaatcttcgcccgctcatacatggtaagtttcaggctgtcatcaagctgcttaacttcggtcagatagatccggtgagccatggctttcaggcttgccactgcgaggaggttctgcaccatcttcggtggttctccaaaacggtccagcagttcttccatcatatcctcatactcttcccggttctcgatcgccgcgatccgtttgtaaatatccagcttctggtattcattcggaatatatttttccggaatgtacgcattgatctgcaggtcgatcgtcgtctcgaagtcttcctgtacttcgattccttttgcttcctgtacggcttcattcagcatcttacagtagagatcatatcctaccgcttccatgtgaccgtgctgttccgctcccagaagattgcccgcaccacgcagttccagatcacgcatggcaatcttgatcccgcttcccagttcagtgaattcgcggatcgcatggaggcgtttttctgcgatttcttttaacatcttatttctccggtacatcagaaaagcgtatgcggtccggttggatcgtcctacccttcctctcagctgatacagctgagaaagtcccatttgatccgcatcatggatgatcatggtattggcattcgagatatccagccccgtctcaatgattgttgtggagaccagaacatcgatctctccgttaataaatccatacatgatcttttccagttcacgctcgctcatctgtccgtgggcaaatgccacgctcgcctccggaaccagttttcggatctgattggtgatctcttcaatgttgttgacacgattgtatacataatacacctgaccaccgcgtgccagttctcggctgatcgcctcccgtaccatctcatcgttatattccatcacatacgtctggatcggtgtacggtcctgtggagcttcttccagaacactcatatcccggattccgatcagactcatgtgaagagttcgcggaatcggcgtcgctgtcagggtcaggacatcgatattctgtttcatctgcttaatcttttctttgtgggtaacaccaaagcgctgttcctcatcgatgatcagcagtcccagatctttaaactgcacatctttggacaacacccgatgggtgccgatcagaatatccaccagaccttttcccagatctccgatcgtctttttctgctggctggcggtacggaaccggcacagaaggtccacgcgcaccggaaaatccttcatccgctgtacaaatgtattgtaatgctgctgtgcaaggatcgtggtcggaaccagataaaccacctgttttccctcctggatcgccttaaatgccacacggatcgcaatctccgtcttcccatagcccacatcgccgcagatcagccggtccatgatcttcgggctttccatatcctgctttgccgcctcgatcgcctgcagctgatcttctgtctcttcaaaaggaaacatctcttcgaattcccgctgccataccgtatccggtccatagcggaaaccggcttcctgctgtctggctgcatacagtgccaccagatcttttgcgatattctttacagctccgcggaccttcgtcttggtcttcttccattcctgtccgccgagtttgtttaacttcggtgtctttgccgcatcagaaccggcatatttttgcaggacatccagctgggtggcgagaatatacaggttactttttcctgcatactcgatcttgatatagtctttcaccacaccatccacttccatcttctcgatgccacggtacacgcccagcccgtggttttcatgaaccacaaagtctcctacggaaagctccgaaaagctctggatctgctttccgctgtactgggattttttccgttttttcttcttttctttgccgaaaatatccgtctccgagatcaccacgtatttgaccatcggatactcgaagccacggcttacccgtccccaggtgaccttgatctgtcccggctggatcagttcttccggatcctcactgtaaaaagctgacagttcctgatcctgcagatcttttgccagtctggccgcccttgttcgcgaaggggataacaacagcatccggtaaccggattttttccagcgcaacagatcttttaccagcatctcaaaactgttgttgtacgggttgaccgattttacagtcagctgcatctccatagtgaagttccacccggttccccgtggctccatcgtggacaacgacagtgtatgcatctgatgaaaccgatgcactacttcctgatggtttcggatcacttccatctgtccgggcagaagataccccttttccagacggtgaatcatactctcccggaattcttcttctgttgtctttgcatgttctgtcaaccggttcggctcgtcgatcacaaccagcgtgttctccggcagatattccaataacgattctgttttcttataaaaataccggacaaaactttctgctccggcaatatgctccatctcttctaactggtcttttaattcagcggcgatctggcgtactctcgccccttcctctgtcttcatctcgtcccggaacttcttctgactcttttgcgcctctttttcaatggctttgatgccctgtcggatcgtctccttatccagcaccacttccgtcgccggatagatcgtaatctcctccagattctcgatcgagcgctggctttccgcatcaaaactgcggatggaatccacctcgtctccccacagttcgatacgccacggattatcctcggtcagagaaaatacatccatgattccaccacggatagaaaactttcccggaacctctacctgcgccgcccattcatacccgagttccaacagatgtcttttcatccgatccaggtcaatctcgctgtcattgcgaatctttattactttttccttccacacggcaagcggcaccagacagtccaggcagctgtcgattgaagtaacgatcgtcacttcttcccgctccagcagtgcgcgaagcacctggatccgttgtctggtaagaagattaccatggatatctgcctgataaaagatcagatccctcgccggataatacagtacttccggatcatacagccgaaaatcctcataaaatgccttggctttcagatcattttccgcaacgatcagccgaaaaggaaactcccggagaagcccattggtaaaatgagctttctgggagtccaggcatccggaaacctgtacgattcccggtttcttcagttgtcttatgatcgcatcaaaatcggccagttcatataatggttgtacgaatgcatccatcgttttccctttctagttaaactgattcatcgcctgatccacttctccctgtaccatcagttccacggcccctgccgcgcgtttcagcgcgtcatccaccagtccccggtcttctttggaaaagtgtcccagcacataatctgccagatcccagcccttcggcttttctccgactccaactttgattctctggaagttctgagtgcccagctgtgcgataatatttttgatcccgttatggccacccgcacttccttttttccgtatccggatctttcccggttccagactgatatcgtcatagatcacgatcagttcttcttccggattgatcttataatagtctaccagggctctcactgattccccgctcaggttcatgtaggtcagcggtttcgccaggatcactttctgacccgcgatcactccttttccgtacattgccttatgttgttttcccgaagagggtacgcgatactcatccaccagaagatcaaccgcgtcaaatcccacgttatggcgggtattttcatactgttttcccggattgcccaggcctacgatcagatacataatgataactccttcatcagccgaagtataccagctcctgctccggtttttctgccgcttcaatctctgttgcgtacaatactggacctctgccgttgtatacttccataaattcgtctttaacttttgcagttaccgttacccagctgccgatccgcagtctcttggctgccggattcttacagatatagccgataaactgggtatcgtccgcacagcaggtcatcgccatacgtccgggcacgaaaaatcctgcgttcagctcacgacttttcaacacctgtcctttgaaacggacggtcttatccacatatttgtccaggttatccatcatatccacataccagataccataatcgatatcttcgatatcaatgatatccgcgttcatatcatatggcatctcatcctggaaaatatcgtcgatctcgccctcttcattttcaaataccacttccgctctggaattgacaactttgacgctgcggcggaagtttgccagcggatgttcatcctgacagcggttgaaaattaccaggtccgcgtttcggatcatctccatgaataaagatttcatattgttcatatagatctggaaggtgctggcatccacggttacgatatgctgtgcaagatcccagtaacgtggcatatcggtctgatagaacttatccacagaccacagcggattgtactctaccagaactcttcccggatgatgttttttattcaacatctgcagggtatccgcgttaaagtcttccgggtcttcgatgatctcgatcaccgtattcacttttttcaggctttcctcatcgtactcctcttctccctcttcgcagagaatcagaagcgttttgtccggaatctgaaaataactctgatgaatggtaaaatccagaaactgggttttaccactctctaaaaatcctgtaattaaatatacgggaacatctctcttcatcattactcattcactccaaaaatttcagcaattttgtcttctgccatcttggaaccgatcacacagatcttacctgtgatctgtggagtaccggtgcgtacctcatactcttccggaaccatatcaaagtagatccactgtccgtcttttccgtccaccatacctttagcacgaaggatcacaccaagatcttctgcttctgacagaatctttaatgcagcttcgatctcttcttttgtatatttcttagcagtctcacggccccagcttgtaaatacttcatctgcatgatgatggtgatgatcgtgaccgcatccacactcgccatcatggtgatgatgttcgtgatcgtggtcatgtccgcatccgcactcatcgtcgtggtcgtgatgatgatgttcatgctcgtggtcatggtcacatccgcactcgccatcatgatcatggtgatgatgctcatgttcgtggtcatgatcacatccgcactcgccatcatgatcatggtgatgatgctcatgctcgtggtcatgatcgtgatgtccaccgcataccgggcagaactcttcatcttcttctctgccctgctccatagcttccagaatctgtgcaccgtccagtttttcgattggagtggtgataatcactgcatccttgttcacttcgcggatcagagcgactgctttggctactttctcttcggtagccttcggtgtatcggtacggctcagaataatcgttcttgcatactgtaactggttctcgaagaactcaccgaaatttctcatatacattttgcatttgtttacatccgctacggttgtatagctgttcaggctgatctcgcagtccacatccacaccttttaccgctttgatgacgtcagagagtttgcctacacctgacggctcaatgatgatacgatccggatgataggttgtgatcacttctttcaaagaagttccgaaatcacctaccagagaacagcagatacatccggagttcatctctcggatctcgataccggagtcttttaagaatcctccgtcaataccgatctctccaaattcattttcaatcagcactacctgctcgccttttaaagcttcagaaagcagttttttaatcagtgttgtttttccggctcctaaaaatcctgaaataatgtcaatctttgtcatgttttttacctcctgaaaaacgcccaaaaagggctgttttctctaaaacagccctgaatttttgtctgcatatcctgtgagttctttcaacagttcctgtcaaaagaactcacaggatattcttaccgaatagttactcctctatacttttatcacgttttgtccaaaaagtaaagccccctttgcgtttcggtttcatgcaactaaccgttcttttcatgcaaaaggagcttatttttctgtatgtattatccgtggatcatcagatggacgatctcccggtctgtctcgagcataccctcagatgccagtttacccacacagcggatcgtattttccactcctttttttacgataccgtcaccgccgataaactgctgtccgttcttatacataaagtaaccaaggattcccgcgtctacagaggatgcgatcttcgctgcgcaggatgctttcgctccgtcgcagatcatacctgatacaatggcaagaccgttgacaatggcatgctcgccctccttcttgccgtctccgtacaggtaggcgatccctgcgccacagccacatccggctcctactgcaccgcagtatgcggaaagtctgccgattccttctttgatatggatcgttgccagatttgagatcaccagagcccggtacatcgtctcttccgatacctgcagttcttttgcaaaaaccacgatcgggacagaagctgtgattccctggttgccgcttccggaattgatcactaccggaagttcacagccgttcattcttgcatcggaaccggcagccgccatggctttggcgcgcaccttgacatcctgatcgccgtaagtggccaacaggacctttccgatattggctccataattaccgcggagcccttcctcggcgatcgccatgttgtaacgaacctgacgttccagtacttcccggacatctgcaaggtccacttcctttgcaaatgcaaagattttttctatggtaagcgtcgatttgtctgccagtgcggattcttcttttccggtaatctcttttgccagaagaatctccccgtttctggacacatgcaccagattcgtgtggaaatcggtgatccgtacactcgcgttatcttctccgtgatataaagtaatctgaatatcaaagatcagatcagaggatgcctcacagacactgcacggaacctctttcaggaaggttcccatcgcttcgatgtcttcctgttccacatgggagatgacctccagttccttcgcagcatctcctgccacgattccggcagctgcggcggcttcgattccacgcagtccaccggtatggggaacaaccacgctttttacattttttataatatttcggctgaccgcaacctccacccgctccggcagggctcccagtatctttctggcaacagctcccgcataagcgatggcgataggctcggtacatcccatcgccggcaccagttcatctttcaggatctggacataagttcggtaatattcttttgaaagcatatttctatctgttcctcactctttttattttttccagcatgccaccatatggcccggtgttctctcttccagttccggttcctgctgtctgcactgatcggtcgcgtaaggacagcgtgtatggaaacgacagccggacggaacatgcaacggactcggaagatctccctcgatgccgcagtgttccagactgagtgcccgcttgggatctgcgatcggaatggaggccagaagtgcccgggtgtatgggtggcatggattgtcatacacttcatcgctttctccgctctccacgatcttaccaaggtacattacaccgatcctgtcggagatatggcgcaccatggacagatcatgtgccacaaacagatacgtcagtcccagttcctgctgcagatcttccagcacgttgacaacctgtgcctggatcgatacgtccagtgcggaaatcggctcatcgcagagcaggaattccggattgacggataaggctcttgcgataccgatacgctgacgctgtccgcctgaaaactcataggcatatttttccatatcgtctgccttcatacctactttttcaagaaggtttacgatccgctcatccatctctttttccggaagtttttcaaagacagatatcggttcggccatgatctcccttacattctgatggggatccagcgcagaatagggatcctggaaaataatctgcattcttttatgatatgcaaggagttctttaccttttgtctttgtgatgtcgtgaccgtcgtaggttaagattccatctgtcggctcatacatacggatcagagtacgtcccagtgtggactttccacagccggactctcccaccagaccgaaggtttctccttttttaatagaaaggttcacacggtccaccgcccgtacttcctgtaccagttttccgaagaaatttttgaccgggaaatacttggacagattcttcgcttccagaagatattgttcttttgtttccatattatttctcctcttctttcttctctttctcgtccagttcttcttttgtgaagatacatctggaggactgggtatcggaatatgcccgcatggacgggatccctttcttacattcctcacatgcaaaccggcagcgggtcacaaatggacatcccgccggcggattcgccagagacggtgccataccagggatcggttcgaggcgttcccgacatccgctctcacattttggaatcgcatgaagcagtgctctcgtgtacggatgggtcggatgttcgaagatctcttctgtggttccctcttccatgatcagacccccgtacatcacttcgatccgtttcgccagagaagctaccaccccgagatcgtgggtgatcagaataatattcatctgctcattttcatttaactgtttgagaagctgcagaatctgcgcctggatggttacatccagtgcggttgtcggttcatcggcgatcagcagccgcggctggcagcacagtgccattgcgatcatgacacgctgtctcataccaccggaaaattcatggggatactgatccatccggctttctgccgacgggattcctacctttcccagcatatcgatggctacttttcttgcttctgccttgctcaggttctgatgacgtcggagtacctcgatcatatgatacccgatctttttcagcggattcagggcagtcatcggatcctggaagatcattgccatatcttttccacgcattttccgtttttctttttcagacatggacagcagatccttctgcagcagttccagatgatctgcctgcacatctgcattttctccgagaagtcccatgaccgacttcatagttacacttttcccacttccggactctcctacaatagccagaatatctccttcatccacatggagggagacaccgcgcaccgcctgaatcttctgtttgtgactctcaaacgtagtggtcagattgtctatggttaatactctgttttctttcatctccactcctcctatttgcctgcgtccatgacacggggatctacatagatccgaagcagattgcccagtttgttgaacgcaaagatggtcagcatgatcaaaagaccggggatgatcgccatgtaaacggcattctgcaggttactctgcgcactctgcagtaattttccccaggaagacagcggttcctgaatacctatccctaagaaactcagggatgactctgtcatgatcgcattggagatactggtggtcgctgcgatgatgatcgtcggcagtaccgaaggaatcagatgacggagtaccattttaaataacggcacgccggcaaagtccgcatagaggacgtactccctctctttgacggacataacctccgcacgcaccaggcgggcaatttccatccaggagaagaatccgatcacgataataatggacaccagtccctgtttgaagaaaatactgataaccgtaaccagaatcagccacggaatggactgcagaatgtcaacgatccgcatcaggataccatctatgataccgccgagataaccggcaaggatcccaacagtgacaccgatggtcacactcatcagcatggcaagcacgccgaccagcagggacacacggcctccgtagataacacgtgccagataatcacgacccacttcatcggttccgaaaatatgggtactgcttggtgcctctaacatatgagcgacatcggttttattcggttccagcgggagtaccggagccagtaaggataatatcaggatcagtgcaaggaagataatagaaaatattgcgattttgtcgtgttttaatgcctcccagacattttccagacgttttttttgagaatgattcattgccatacgattaccccatctttctgatacgcggatctgtcacgcagtataaaatatcggacagcaggtttcccaggactaccagggtggaagacaatatcaaaacgatcataacaatcggatagtccataccctgtaccgccttgataaaatacggtccgatacccggccagctgaatacggtttccgtgataaccgcacctgttaccagcgttggcaatgccatacccagttttgtgataaccggaagcagtacgttcttacagacatgtttgaacatgatctctgctttggaagcgccaaatgccttctgtaccataacataatcctcggagtactgtgtgatcgtggaagaacgcacataacgcacattgtccgggataaatgccagtgtcagcaccagatacggtgtaataaaatgcaacaggaaatcagacaaagtattcacgcctaccgtatgcatcccaaggatcggaaggatccgcagtttatagccgaacagatagataaagagcatcgctacccagaaagtcggcatcgcgatccacagggaacagatcccgtcgatcagtttgtccagccatttgtttttgtgagaaccggccaccaggcccagcacgattgagatcacataggccgtcagataagacggcagcaccagcttgatcgtgttcgggattcttgtcgccagctcatcgaaaatattcgtttttgtcacgatagaatagccgaagtttccattcaggattccttccagccagcggatatactgcacatagaccggctgatcatagccgtatttttcacggatcatctgtaccatctccggagacatctttggagttgtcatggcatcaattgcatcatacggtgccagatgaatcagagaaaaacacaggatcgtgatcacgatgatcagtgggatcgcagtaagaatacgtttgaaaatatactttgccatacctttttctccttttgtttttcattcttaagtccaaaaagcggaactcttcgcctgtttcagaagaattccgccctcattataaatagtgtctaatctttgatgattacttattcagcaattttcagactggaagtatcctcgaaggtatataccggaacaagtcctgcatcttccacaccctggattctgttatttacaaccaggatcttgttgttggaaatgatcggatagaaagcacctgtatcctgaacagctgcctgcagttttgcataggtttcctttcttgcagactcatccaattcagaacgaccttcctcaaacagctgattgatggtatcgtatccactgtagtgcatgtagttgtaagcaccatcattttcaaacaggctggagaaggtatccgggtcaatacccatgatataaccgcccagatacatatcgtattcgttatccggatccttcattgcgtttgcaatggctgttccgtctccaccggcaagttctacggttactccaacttccttcagctgttcctgaatcagcagtgcctgtgcggactgtacggcatcactggagatgtaacccagtttcagtttcagaccactcacaccggcttcctctaacatactctttgctttgtctacatcctgctcgtatttttccacaccgtcttctgtgtagaactggctgttggttggcaggaaggtatacggaatgctgtagtattcgtcagattcgaaggctgcatcatccattgcttttctgtccatggcaaacagcagggctttacgaacgttttcgtctgttacacggttgcagttgatctgcaggtaaccgacacgaccctctgtgtaagaataagcagtcaggttgcttgcatccagatccagttttttcacctgctgtggtgtcatctgataagcatccacttcaccgttctgcagagccaggatcgcagtatctgcattttcgatgatctggaatactatatttttaacagacggttcacctttgtagtagttttcgtttgcttcaaacttcagatatgagcctgactgatactctaccagtttgtaaggaccggttcctacggagttcatgttgtaatcgttatgctcgaaatctgtgacatctttgtagatgtgctccggcataatgaaaatctgacttaacatctcgatagccgtaggtgttacgaacgggaatgtgaaagatacggtgtagtcatccactttttccacttttaccgttccctgatcgtaaaccagctgagaataagcccagccaaggttatcctcctgttccatggcttcgtatgtgaataccacgtcatctgcggtaaatggttcaccgtcagaccatttcacatcatctctcagtttgaatgtataggtcagattgtcatcggatacgctgtaatctgtagccaggaaccagttaattccatcggcattattcatatacagtggggagtagatcatctttacagtagataatccccaacgatcagatgttgtaataacattgacagtctctgtggggtccccggagatggcataggtaaatgtgctgtcaccagaagtctctgtggtagctgtactgctgtcggcagtggttgtgcctgctgtgctgtcatcttctgcgaccggatcttttcctccacaggctgtcagacttgctgcaagcatcgctgtcagagtaagtacagatacaagttttttgaatcttttcattttactctttctcctccttatttggcctgattttttaacaatcatacttcatcatgttagcaaaggaaggtacatttgtcaattcattttcgtcataaacatagttttttggtatgtttctgattcgttcactgataatatcccgcgaggtgttttttgtattgttctcacaaatcgaaaaaagcccggaaataaccggtgatttttccggtttccggacttttctcaggtcatcagctgcttttttcacagcttctgacttcacatgccatcttcacatttcttgttgttatattttttacgccctgtcccagaagctcccggaaccgttcctcatcattgacggtccagacggacagatcaatatcattttcaccggtcacacggataaattcttctgtggcaatcttttcatttacattcacggtatgtattccgtattttctgcaggctctgctgattttgtatgccgcctgttcaaaaagaagatcctctttttgttccttataaatatccggaagatattcctcgatgttccagaacacttccacatctctccagatacaggattctgtcaccggaaccggacggacacttccggaataaaggatctgctctgtcttcagtccggatatcagggccagctgacgaaccgccacttccagcccacactctttcagatcgcagttgatccgcatccccggatattttcccatcatacggaatacatcggcaagacgtaccgcatcttcatctgtcttatcgtgggacagaatcagaattccgttttctcccatccgcacatctacttccagtgcatcggctcctgtctgcatcgcatacgctacgaattccagactgttttctttcgttccgtccgctccggaatgggcggttatcatagtctctcccattatttttcccagtccttttctttcagatttgtatagatataaactgctgcagacactgaacagatcaggaacatgatcacagacagtgctgcggaacgattgtaggacagatatttgttaaactgatcgtacagagcgataccgagcatcttcggtgagttgccgcccatcaggtacggagtggtaaaggaacccacattggacataaatacaaacgtggatgccaccaccacatctttcatggacagtggcaggatcatgctggtgaaagttttccatcttcccgcaccgctgtctctcgatgcctcaatgatcgaatccgggatcgctcccagtcctgcggcgatcatcatggttgcaaacgggatgttaaaccacatattcatcacgatgataccacttgcatgatacatcagccccagcttgatgtccagtccgaacagcagaccgatccggttgatcagtcccgaatcacggatgatcgtgatcatcgcatacacggcacacatggtcggtacaaatcgcggaagcaggtacagcatgccgatggctctcgagatccgggatttgacaaaccgcagatacagtgccagaagatatgccagcacaatggcgatcacaaccgtcacgatgacgacaaacagtgtgtacagcaggttgtttctctgtgcggtttcggtaaaaaagtaggtatagtttgctgtggtaaatgcaccggtatcctcatcctgaaaactctggatcactgcggatacaatcggataagcgactgtcagcattaccaccaggaatgccggcaacaccattccgtacgctgccagcagtccttttgtcttattcttcatatttgctcctttggatctgactctagttcagagttccgatctcgttatcccatttttcgttgaagtctgtagacagatctccgatagacatgatacggaagttgctgacatccaggctttccacatcttcataaccggtcatatccagctgtgcggtatcgatcagcggaattgctgccatctgttttaccagaatctcctgtgcagctgtggtaaggatgtagttcatgaatgcgtaagcgccttcttcgttggaaccgaaggtcgggattgccagagactggagagaaccggtcagagacggatcgatctgtgtgatcttaatggtgtcttttaaggttccttccgctctctgggacagtaccatatctgcccagttcggacacatatcgatctcaccctggttcagcaggtccagagtaccctggtttttgctcgggtaaaccacagaaccgccggactgatacatatacgggtgaatggatttcaggaagtcaaatccttcggtccactggtcttcccaggaaggatcgtcagaggtaatcgcctcttccggcatgtagttgtatacggaagtacgcacgaaagaatctccggctccaccggttcccggtgcattgtaggcgaatcttcccgggttatccttcatccactgtaccagctcatccatagtcttcggcggtgtcggtactttttcggaatcgtaagccagaataacggtagttccacgataaggctgtacataatccgttgccagagcgctttttgcttctacattttcagaattcgggattttgttcttatccagttttacaaaagcttcctctccgatctgggaaatcactttggacagatcatcaccacccagatctaccagatcataatctgtatccgtctgttttgctttgtaagcggctgccagcatatctgtcatggactgtgttccggtaccactcagcataaactgcagttctgcctgatatttgtctgcatattcggaattattattaaaatcatcgatcagtgtctcaaaaacctgacgtacattatcagaaccactggcccagatcgtcagtgttgattttccatctgtactttcctgtgtctgtgcactgtctgtacctgcaccgtcagaacctccctgtgcacctgttccacatcctgccatagataccagcatcattccggcaagcatcgctgccattacttttttcattttcattttttcatttctcctcatttgcttttgttatggattcttctatatgatgatgtcagaagcagacattagctgcccccggcttattgtctcactgtcttacgcagcctgggaaaataccgtgtgttttccgatcgtgagatttaccagatctccctcgcgaagctgatcactcagttcccggtcgacataacatttgatgatctcatttccacgctgtactgtcagaaccacataatgaccgagcatcatgatcgtgcggacaactgcttccatcggaccgtgtcccttgttgactacgatatcctccggacggactgcaatcgtgctgccgccattccggataaagttcatctccccgatgaaggatgccacatgaagggttgccgggctgtcgtagatttctcccggtgttcctacctgatcaaattttcctttgttcataaccacgatccggtgggacagtgccatcgcctcctcctggtcatgggttacgaaaataaccgtgataccgaggtcgctctggatctttttcagctcctcacgcatctgctggcggatcttcgcatccagtgcggaaaatggctcgtccaacagtaacagagatggttttaacaacagggagcgggcaatcgcgattcgttgctgctgaccaccggagagctgtcccggatattttttctcaaaaccgctcatggaaaccagttccagcatctttttaatctctgcatccatctcctttttcggaaccttccgcagttttaagccgaatgccagattttcatagatggtcatatgcggccagagattataactctgaaacaccatagcggtcggtcttttttccggtggcagattcacaatggactgtccgtccaccagaatatccccgtcagtcacatccatgaacccaccgatggttcttaagatcgtggatttaccacatccggaaggtccgaggaaggttacgatttctccttcgtacactttcagattaatgtgttccacaccgtctccgttatcatatttttttgccatatcttttaattccagttttacttttcgttcttccatactaacttctttctatcctcctggatattctttcactttttacttcatcttgaaaccaccggcaattgcttccggtccgatatattttctcatcacaacgatcagcagtgccgacggaatgatcagcagaatggcaaataccgcaccgatctggatcgcggagctgtcaagcacgattccgtacatggctaccggcatggtctggattctcgcaagacctaccagcattgttccctgtgcctcttccatggaaccaaggaaggtgtacagggtggcaactgcgattcccggcatcgccatcggcagtgtcaccttgaagaaggtacggaccggacttgcaccagcatccctcgcagcttcctcttgctgccggtgtacgttgcggaacgcactcgagggcagccataccataaacatcatggagttgatcatgtgaatgataattactccggcatatgttcccatcagtccgtatttgtaaaataaaacggcgatggaagtgtagatgcccagctttgggaatgcattggtcagcaggaaggacagcataaatacttttcttcccggatactgaaatctcgccagtgagtacgccgccggaatacagaagatcatcgagatcacagtcgtcgcaatcgcgatgataaaggactggatcatcgaagacaccagactcttctgtccgaacacatacccccaccacttaaagccccactcctgtggaagtactgacggcacattatattcatttgcaaacgctaacatcagcatattcaacagcggtccgtaaaagaataagataaatacggccagcaggataaattccagaaacttcttctttccaacggcatgataaaaccgtctcggatttaacatcttaaacatctttttcgttctcctttccgaaagacagagtatcatgcccgggcggggtgcttctatcgtggttttgtaaagttgtgttaattttttgtaattcacatacaatttacagaacttttatttgggcattgcggacgaaccaaatacgctccgcacgctttgctcattatcacagcattcgctcgccatggaacttgcaggcaattattgatatgcaatgaaaaaaaaacctgccagcagttcataattctctgctgacaggttctgtcattcttttttatctttatttttttccttaattaaatgcaaacactgcaacttcatacggagccagcgggtatgccacatggtatggctgtccgtcacattctcccttgaccggtttgaataccggattgtccacatgatgctgtccgccgtaagccgggtctgcactgctcaggattaatttacactgtttcttctgcggtacacctacccagtagtctttccgttctaccggagtaaagttgcagacaaacagcaggttgtttcttttcgtcggtgaccagcggatgaaactgtagatgcttctgtctgcatcattggcattgatccattgaaaaccatcatagccattggcatccgcatacagtgccggatattttttatacatcatctgcaaatctcttacataatcctgtaactgctgatgtcttgcctcacggagcagataccagtcaagctctctcgcctcactccactcctgaaactgtccgaactcctgtcccataaaaagcagtttcttacccggatgacccatcatgaaggaatatccggctttcagattctcaaatttgtcatcgtactctccgggcatcttgttgatcatggagcatttcagatggacgacttcatcatgagacagtaccagaatatactcctcgctgaaggcatacgtcatggagaaggtcatcttattatggttgaattttctgaaatacggatccagtttcatatactccaggaaatcatgcatccatcccatgttccacttaaacgtgaatccgagaccgttctctttctccacatctccggttactttcggccatgcagtagactcttccgcaatcatcatggttcctttgttccttccaaggatcagggtattcagatgcttgaaaaattcaatggcctccagattctcattaccgccatatttgttcgcgatccactgtccgtcttcttttccataatccaggtacagcatggatgccactgcatccacacgcagaccgtctacgtggaactcttcgatccagtacagagcgttcgcgatcaggaaattcttgacttcgttttttccataattaaagatcttggtaccccagtccggatgctctccctgacgtgggtcagaatgctcgtagatacaggttccgtcaaactctgccagtccgtgagcatctttcggaaaatgcgccggtacccagtcgaggatgacaccgatcttatttttatgtaaataattgaccagatatttgaattctttcggagatccgaaacgggcggtcggtgcatagtaaccggtaacctgataaccccaggaaccgtcaaacggatgctccgcgatgcccatcagttccacatgagtataacccatacgttttacataatctgccagctcatgtgccagttcccgatagctgtagaaaccgtccggatctgcctcagatgccggatgttttttccaggaccccggatgtacttcgtagattgagagagccgctcttctcggatcggtctcttttctcttcttcatccatgcggcatcgccccatttgaaacctgtgatatccgcgatacgagatgcattgcccgggcgcatctcagaccagcttgcataaggatctgctttgtacagcagtcttccgtccatggcacggatacagaatttatacagatctcccactttggctcctgcaacaaaagtctcccagacaccgatcggtcctgtctttttcatcggatggcgctccggatcccagtcattaaactcaccgacaacagaaacatcctctgcgttcggtgcccatactgcaaaatacgtgccgctttttccattctgtgttaccggatgtgctcccagtttcttataaatatcataatgcgttgcctgaccaaacaaatattgatccagttccccaaactccatctttgccatatccccgtctcctttttcttttatcttaactgtctttccagttatttttcacactcatacatgcaactgttccatactttcgcagttacgaataaataccgtacaggaactgccggacgatctcatacgttctctgatccgtcatcaccagtccgtgttcttcatcctgctctcttcccagcatcatcatatgggaatccagaatccccatgaagctgaccgcgaactgctcctgacggccgcccatatttcccagacgatctgcagaatcctcgaagatccgcaccacaagctggtaatacttctggatcagcggatacaccgtacggaatccttccgatttttttccggaataaaactgactcagcataaacagataaaactgccagtggcttcccgcaaaatcaaaatatgctctcgccacacgatataacacctgcgggacatcccccggttcttccactgctttttccagcatctcttccagaatacgactgttctcctcaaggatcgtttccatcagtccctgcttgcttccaaaataataatacaacgtcggttttgtaattccggactgttctgcaatctcctgcaccccaaccgcatcatatccacgggcacaaaacagttccagcgctttttccatgatcagctgccgattatccatctgtctcagcccctttccttatatttatcagctgttgatccgtaattttccagggtaattccctgtctttttatattataccaatcggtatataaggtgtcaacgcaatcttctctttctgactcttgcttttttaccaaaaaaagtaattatttttcattaattttcacaaaatcttcagatatgttttcctgtatttgtggtacaataaaatctgaaattctaacaagggggagtgaactatgaaatgtccatcctgtggtgctgaagtcaccggtcgtttttgcagctactgcggtgcaccgcttccggccgcttccaatgacaatacttcagtcacaaaaaatacagataccgatcgtctggtggatgactggcagtccttcgatgattatgtaaatcgcgacttatcaaaaccagtcgctgatactggcaacggtaccggtagtcctgcttccggtaaaaatgagactcccgctgccagacgtcgggaagagaacaaaaaaaatccaaactccggttccggcagatccagaaatactgccacaaaccagcatacgattcataaaactaccacgcagaaaaccaaaaccaagcgaaaaaagaagaaaaaaggaggcggactcctatctgcagccacttctttaaccactggaagcgtaaaactgggaggcaccctgttttatcttgtgatccagtggatctgcgtagccctgatggctttgtccacccttcgtatggcacagaacttctgggccaaccgggtgacccttggctccatcgctggagtagtccaggaaaagaattatgcccagggaatctatctgattggggcactgatctgtgtgggctttggttgtatccaggcactgtggatcgccagcagaaaacgtatgccggatcacggcaagatccgccaggtagatatgggacgggggctgttcggtttcgttgttctggttcttctggcatttgtatccacttatgcctatcccatccttcccgccaacccggctccgctggaaggagccaaattgttcttccatatcgtggatgatctgggcaaatcctttttgttcatgaatgtgatcggagcagttttgtgtgtggtgcgtaagatggggacacggtagtcgccagggtaccatgcagacacagactttggctcgttgctcgcgtaacttaaaaagcagaggaaatcgttcttcatgaacagatttcctctgctttttttcacatattcaggcaaaacaattcgtttttatcttggccagcggtcttctttaccaggaagttccgggaagctgttatgtggttctgcctgataccagtatgccacacttgccacatcatcctgtctctcgaataatcctctgtatcccacaccgatctgctggatcgtcactttcagatcctcatcgaaacagatcggatcctggatatgccagcggtaaaaacctctcatcggcataacatcgtcattgtgatagaaattgtgaatcaactcatcatgggaagaataatatggatatcccagataaggtgtgcaataattctgttccacggtcttaccgtctacctgcttagcaaagctccaggaaccaccgaaataatcttctgttcctgttccgcagatagtaggatattcttcatctccgtcaatgtagaacttaacctcaccttcaccccaccagtaacgctccagtgttgtcagtgccatataagtacctacatagtgaccttttcctttgacattatcaaggattacataatctttctgcagctgagtgatcttttctcttctccactgtgcgtggaagtaagcgatatcctccggcagtccctcatcatacaggcaataatccacctggtagaagaatgccggaattggattgacatgctggttttccagagtgattcttgctttttttctgaaaggcatctggaaataacagttcaatcctctgcttggcactactgcgatcggcatagaatttacattgcattctctaccaaacccacagcagaaaaagtctcccagcgggctttctacagacggttcctcttcatcatcccagtacatacgaagaaccagatctctcagtacaaagcaatctgcgtctgtggttttcgcatccactgtgatccagatatgattgatcgcgccaggtccctcgatctctgccagtgtcactgtctgaccacttgcgatatcgttaagacacggacttccttttctggaaggtccaagatgacttgctgccataccaccttttcctttttctcctttgggattttccgcattgatcgcacggcttttcctatgttttgctaatgctaaattacttaatgttccaccaaattcgttatacattctcacgtcctccttctagtctccgagtagcatcaggcttctactccttttgccattatatcatccataacctcttttttaaagactctaaaaaaacatatttcagatgtttgaccggataccatacatatagcagataacacaatagccgggaaaaactcacccggccatgttatttttattctactgctttatacagttttaccggaaaatcatctgcgcaaagtccgcaaagcacggtctccacacattccagtcatgtccgcccggatagattttcctgatttcatggacacctttctcctggatgattgcatcctcttccagaaatctggaaaggaaacagtcattatctccgatacatcggaaaaaggtatgaaaatagttattaaagtccggatcgtccatcgccttcagatgaatctgctcataaggttttcttccgaccgcatcccggtccggattgccttcgatgttttctcttataaaacctgagaagatgccgacttcgctgaacaggtcaggatggtcgcatatcgtccgggttgtctgtacagaacccatggacaagcctgccatacctctcttttccttacaaccgccaaactgatattttttctctgccatcggaataatttcctctaccagcatccgttccagcaaaacatggtttaatcgttcttctgagccgaccttttcctgtaccatgccgtcactcatcacaagtgcaaaaggttttatttttcccatttcgatcaggttatccagtatgatattggcttttccggttgttgtccaggaaatctcactctcaccgaatccatgctgcagatacagaaccggaagacctgcagatggtacgcatggtggaagataaacgatgaatcgttcccagttattggaaatctcagacttatagaattcatgtgtcagcgttccatgcgggatgtcacgaatctcagccagcttcttttcatccggcagttcaatataattgtataaacggccatatccatgtccgatcggcagatccggatgcagaacctcctgtccgtccacacagatctgcacataattcacagctgtggaaaacggaagttccagaatccacttttctccgtcttttgcaaatgaataggtcttatcatcccactttaaagaaagctcttttgcattttcacagtccagctgcaaaaaattctttccgtctttccggaaaagtatgctattttgttccataagtgcctccttactctccatttttctttacatcatcagaatttcatctgtttgcatgttctgacgccattgacgtagatatcgtttgccagctctgtgacaagccgcatatcctgccaagtttcacacttttctcccataaaagtaatgttatcaaagtgaatatcatggacacgcacttcttctgtcggtgtctggaatccacggatcgtagaaacggggatatctccgtttaacacctgaatgttgtcaaaatagatatcatggatctctccttttgccatctgctctgtatatctgcaaagcagaaccttgatatcaaacagtttctgttccgcctgttctactctgatatttttatagtggatatcatgaatgtgacctccatctgcctggtggatagaaagtgcggcaccgcccatatttccttcgtactggcagtggatgatatcacagtcttcgaataccagatcatgaatctcactctggagagcataaccaagctctatggcattaccaggttctgcattccagattacgttattgtgaacgcgtacttttgtcacatcccttactgttgaaggatccttaaacagcccctgggatttgatgcagatactgtcatctgtggaacggacaaagcagtttttcacctccacatcctggctgctggtgatatcaattccatctccagttacgattcttgacataatattcatatcatcaatgacaacatgatcacaggctgccggaaccacatgccaggatggtccgtctactgcagtaaatccttttaagagaacattcttacaccatttgatataaataaagaaacgatgtgcgttgctgtccggcagatgccagcaggctccgttgacaattccgtttcccacgatggaaatattttcactatgttctgcatagatacatccggaaacaacagcaccttcttcgatataaaccgtatcatttgatttcagggtaagaactcctacattgtatgccttacctttttcaaaacagatggtggtattttccggtttttcgattctgcgagaacagaatacaaacagggcgtcatggagaccaccgtctgtctctactgtgaattttctcggttcatcgagatgaatatgaacggtctctccttttacggaaggttctattccgaaactggtgggccggatggccagttctttaaacggtgtatggatggaaatttccagatcatatgcctcattgtctactactaccacataatcgaatgaatctgtatggtataccacacgttctgttccgttgcagatcacactgtatttttctgatttctccagttcatctacagaatttaagacaaatctcggttcctcaatgggatccggattgggataataaatcaaatccttttcaaagtctttcatcggtctcttccttctccttatacttaaatatatatctcactgcttccccattcatggtcgctgctgtttcctacactgattcgaagcttcattccgcagctgacgattttcatatttttattataataagaaaactctttcgggtcaatatagaaatccacattcttcttttctcccggatccagaaagactttctgaaagcggacaagttctttctgcggacgcaccacagatgcatgcaatgtttcgtagtagcactgaacgacctctgcccccgcaacattacctgtgttacttaccttacaatgcacatgaactcttttgtcctgtcccatccggacttcaacatccgaaatatcaaactctgtataggataatccaaacccaaagggatataatggtgtgttgggaatatccatatatctgctggtgaaacggttctccaggttatccgcagtaagtacatgtccggtttttatatcccagtaacttatcggcacctgtcccacacaccatggaatacttacagccagttttcccgaaggattggttatgccatacacaagatctgtgatcgcttccgctcccatggttcccggtctccatgccatgatgacggctttggatttttctgagattctccgcagatccaacggtcttcctgagatgaccactgtcacgatattatccgtgcgttttgctattttttcaaaaagcatctgctgctcttccggtaaagtcagaaacgctctgctggcagcctctccggactgagattcatgttccccaagtacacatacaacggtatcttcccgggttatcgtttccagccactgctcatctatttcttcatccgaatcatcctgttccacctgccagatcttgcattcttcctcagaaagcattctacagcccggaatacattccgcattcatcttcttatcttgaagaatagcttcgatcgtttcaacaggttcatgctcaccaaagattgcccagcggctcaggaattccttggatgtcacataaggtcctgcccagatgactttctgtttctgacacaagggcagtatttcttcatttttcaaaaggacgcagctttcgctggccatctgatatgcttttgtccggttatacagggtcagttttccactctttccaagacctgcaaagggattttcaaaaagtcccagctgatttttcatcatcagaacccggaatgcgctttcgtcgataaaggattccggaatctgtccgttcttcaccagttcttccagtcggaacatataagcaggactcatcatatctatatccactccggcttctatagcctgaaccgccgcttcatccatatcggctgccacaccctgttcttccagctgtccgatggaaccccagtctgagatcactgtaccatcaaatccttctttatcccgcagaagttctctgagaagttccttattcccactgatcggttttcggtctatggcattaaaagcggtcataaccatagctggttttgccttcaacgccatgcggaaaggttttacatactgttccaggaatgtccgttgggatatttcaacatcgttatattcccggcctgcattcactgctccgtaacctgcaaaatgtttcagacatgctgcgattccttcatcgtttttctgctgataaccatctaccatggcttctcccatgactccgttcacatatgggtcttcaccaaaagactccagcatcctgccccaccggggatcccttgaaacatcgatcatcggagaaaaggttgccttaagtccttcagaagatgcctctgaggcagctatcgatgctgcctctgacaccagttccggatgaaaggaacatgcctgccccagtggaatcgggaaaatcgtccggcatccatggatcacatctgccataaagagtagagggatatgatggggatgctgttccatatatttgctctgaatatcacatattttttctttaccgatcactcccagtacggagcctgcatactgaatgacccattccggcggtaattgttcgccgacaactccggtaagcactgcctctttgtcaaaatatacaccggtaagctgtaccatctgtcctattttttcctgcaaagacatttctgacagcaattgctgcaatttatgtatttccatgattactccttatgtttgatctgttgtaactgtaaaggcactgaacagttacatctttttttatttctttccactacagtgtttcgtaaataactgtattattcacgcaggatacggattcgagtgcgcaggtccaaaacgcagacgtagcagtctacgttttggacctgcacggtcagattactttttaatcaaaataaatggtcttaccgctctttgctgactcatagattgcttccagtacacgggtgacaactgcagcctgtgcaggttttactacctgttcagctccgtcagcaacgatgtggtagaacagttcctgttcataatctcctgccggtttttcttctcctgagaagaatgctactccttcacctgataatgccggtttctctactacctgtttgttgtggtggatgtagttgatccgcaggccgtctttcatatctgctccggcttttgttccgcacagacttgtcttggcttcatcaacctccagtgtgttcagtgcccaggctgcttccagctcgatcactgcgccgtttttcatacggatgaatccgaaagcggaatcttctacacagaattccttcggatcccagtctccaaaggcatttccctgattggtctggtcagccagtttgtggaaggtctgtcctgttacagactctacttcatagttgtccatcatccataaggtcaggtccagtgcatgggttccgatatcgatcagcggaccgcctccctgttcttcttcgtttaagaatacaccccaggtaggaactgctcttcttctgagtgcatgggcttttgcaaagtagatctctcccagttcgtcagccttgcacatttctttcagatacagggaatctggacggtaacggttctggtatccgatgttcagaattctgcctgttttctctgaagtctccaccatcttctgtgcttctgcataattctttgccatcggtttctcacacataacatcttttcctgcttccatagctgcgatggagatctctgcatgggaacggttcggtgtggttacatatacaacatccaggtcctctttgataagctcctgatagtcttcaaatacttttgcatcttctgtgccatattctccttttgctttctctgcacggtctctgatgatgtcacagaaagctacgatctcatagagaccacttttcttcatagccggaaggtgttttccgttggcgattcctccacatcctacgattcctgcttttaattttctcatggtattatctcctttttctttattctatattaaatcacgaactgttccagatatctcttgctgaggatcaaagaattctcaaccttttccttggaatcttcaaaggccttgtcctcgatctcaatacaggtataaccgtcatatccgatgtctgtcagtgctgatacatattttccccagtccacatctccgagtcccgggagcttcggtgacatgtattccagcggatatgccatgataccgcaggattccagcttgtctttatagatcttgatatccttgtagtggacatggaaaatcttatctttgaactcataaagcgggcggatatagtcgatcatctgccagataaagtgggatggatcgtagttgatgcccagatggtcactgtccaggatccggaatacttctctccagatcggcggtgttgtcatcaggttctgtcctcccggccactggtcctcgccgaaaagcatcgggcagttttcgatggcaaccttcacgtcacattcctcagccagttttatgatcggcggccagatctcttttaccagttccaggttttcctgtacatttttggtctggtcccttccgataaatgtggtgaccatgcccacacctaatttcttacttgcaaggatcacctgcttcaggtgttccacagcggctgcgcttttctctttatctgccgccatcacgtttggataataggccagtgacgagatctccactcctgatttttttgcatattccacgatatgctctgcatatgcatcatcctggttgacccgttccgcatcgatatggcttacaccggcatatcttctttctgctttttcctgtggccagcatgccacttccacacactcaaatccctgctcagacgcaaaatccatcatctcttcataggtccagctgtcaaggatcgctgtaacaaacccaagtttcataggaatgccctcctgtttctttctgtctctgtatatctgtattatttctcccacggagttggtgtgaactctccgcctctgcaccatttcagatagttcagtgcgtggagctgtccggtcatctccagttctccgttgtataccggatcgtgatatccctcgatacagatatcgtcctcatatccgttacttcttaagatagaaatgatatctctccagtttgtgtcaccaaatccaggcatacggtgccatacgaatggaactgctccggagataccgccgtgtcttactgcatcccagtcgatggtcgcatcttttccatgtacatggacgatctttttgcaccattttctcagctctgtcacagggtcgatcagctgtaccatctggtgggtcggctcccattccagaccgaagttgtcattctttacttcctcaaacatcacttcccaggctttcgggttgaaaccgatgttgcaggtggcatgttcccaggttccatccatcaggcagttttcgatacccagtttcacacctttttcttctgcaaggtctgccagttcacggaacacttttccgaactcttcgtatgcggattctaccggttttccttcccatgctcctgcaaaggtgcttacgtgggtagctccgaacttttcagcagtgcagatcaccttttccagtgtctttctgtgctctgcgtactggatcgggttacagtaatatccgagtgtagtaatcttggaatctgttcctgcaaggagtttgtctgtggtcagtgccagtttgtcaagatctgttccttccagtgacatatggaaattaagggaaaatgtttcgaatccttttccaacaaatcctttcaaccattcttctgcaacgggtcccggcacgcaggttccgattttaatctgtttcatacttttttcctcctgttctgttacatgcactctcggagaacatgtacaactggtttcaatttttatgttatatatgttctgcttatgatttctatctatagttattcagtatcttcttagttacacctgatcctgaaattcgatcacctggtttgtctctgctgaccggaagattgcttccatcagtttcatcacgcgcatcacctggaacagcttgatctcaggttctgctccgtcccggatcactgcaactacatttctgtggaaatctgcaatatctccggatacttttggtaagtcttctttcacaatggtatcttcccgtctcggtgccatggtctttgtcagaccggctgctgtcttaaccggtactaccgtctcttccgtcctaccggtcttacggatgatctcaccgtttaactgccagtcccggatcactgcggtaccgtcttctcccagtacataccatctcggcagggaaatataattattggtgccgacttccaccaggacttccgttccaccttcaaatgtcaagatggcagtgaagccatcgtccacttcctggttggtgacattggtaagtgatgcgtatacggtctcgatctttctgtcgccgtacatatataagatctgatccagcagatgtacgccccagtccaggaccattccgccaccatggaccttttcttttctccagtcaccaggaattcctcttgatccatggacacggctctcgatccggaagacatgacccagtttctgctcctctaccagctttttgatgatcaggaaatcatcatcccaccgtctgttctgatgtacagtaagtaattttcctgtctctttggctgcattttccatctccagcagatctgcggaagataatgtcaccggtttttccgatattacattcttccctgcatgcatggcacggatggcgataggtttgtggcagtcattcggagtagcgatcagaaccacatcgatatccggatctgccagcatggcttcttctgtttcatatacaaaaaagcccttctccttcgcttcttctctcttttcttccttgatgtcatagatgccaccgattacagcttccgaaacattggaaaggatctccgtatgccatctgcccatgccgccatatccgatcagtccgtaaactactttgttttccctcattttgaacctccatcgtaaaaacagcggctgatgaacaccatcagccgctatcgcttttacttacttaattcttcgttgatttctttaagaatctggtcaccgccctgactcttccagttctcaacaaaagtatcgaattcgctgatatctgcttttcccataacgatttttgagaatgtttcttcttccattttcttcagattggcccattttgtttccattgtttctgtctgaccgttatatgcattgtaaacaggtacatatttctcatttacagaaggagcatctccaaccaggatggccacaagtctcggaaggttgtttttggcaatgtcactgtccagattccatttatccaggctgaagtcatcgtaaggctcttttttcagttttttaactgcttccatatcactctttaacagtttgtgtgttgagaagtcaacatcatccatggtgatttctccggcaagatatttggtcagaacatcataagacacttcaatttcatctgcattgtcataggtgttgtacagaggatagaagtccgcagtacccatctctgtggtagaaacaccttcgtctacccatttctgctcatttttgatcacgtaattgacaatcttaaatgcagcttccggattcttgcatgctttgcttgctactacatattgtgttgtaggctctgccatatgagtgtaatagtttccatcctctgacaatggtgtaaagtatgcctgccagtctgccgcacctgccagtgtagcatctgccactgtgtaaccagaccaccatggtccaaagaagattccaaccttgccggccagaagaggttctttactgtcacttcttacaagcatttccgggtcgatcagtttatttgtatacagttctgaaattttttccagtgcatctctggtttccggctggatagaaccatactctacagttccgtcctcaccctgcagccagtactgtgggtatgactggaagctactgaacagcggatccagtccatactggtttcctccgattgcattcatatgatcggaattactcggtccgagaataccaatagtatcatcctctccatttccatccggatcctgagtaacaaacgcttctgctacctttaccagctcatcccatgttctcggagcctccagtccaagtttgtccagccagtcctgacggatccacatttcattgattccacctgctgttatggccggagccggaatcgccatcagttctccatcttcattggtgatacatttctgcagttcttcaccgccggatttcacataacttttcagtgcatctgaagcataatcatcaaaatacttatccagtggctggatcatatcgtatttcagaagcgctctgtactgtgttgcatttacgttcatcagctccggaacggtattacttccgatacacagattcattttctcttcaaagtctgtggatgatgcaacccagtcatatacaacttcgatgttaagatcttctttcagaaaatctatgtatggattatcgtcataagccattccgtccggaagcttggcattcgggttcagagaaccaccaagatgaaccgttacggtttccgggtatttggacagcggcagatcttctttggctgttccttctgcctcacttactgcctctttctgtgtgctctcttctgattttccgcatcctgccagtgaggtaacggctaatgccattgcactggcaaatgcgatcaactgtttctttttcattctttttcctccttttatccttttactgatcccagtgtaataccctctacaaaatatctttgcaggaacgggtaaacgatcagtacaggtatcatagctataaatatttttgcagaatccaatgaaaggttatttaatttcattgcctgcgcaatctgatccacgttcatcgtggaataatccagagttactaccatctgctgaatgtaagtctgcagcggataactgctctgtcttgtacttaaaaccattccctggaagaattcattccagtacataaccatggtgaacagtgcaactgttgcaaccataggttttgccagcggtacgtagatagatatcagatttctccaggggccgccgccatcgacaaaacatgcttcttccagttctactggaagatttttgaaaaagtttactgcgaggattacattgaagacctgaagtcccgttcccagtaccagtccaaaaatgttatccatcagattataatttttcatggtgatataccacggaaccgtacctccgttgaataacatgcagaatacgaagatccacataaagatatctctcttcgggaactgctttttcgttctggataacggaaatgctgccataaggatacataccatactgattcctgttcccagtaaaacccttttaatagataccagaaaggaaccaaagaatgcggtctctcccatgatcttcttataggagagcaagttgaagccaaccggccagagagcaacctgtccagcattgactgcttccctgctgctcagggatacacagagaacgtaccatacaggtacaatacagatcaaagtaatcgcaatgagaatcactacatttaaaatgtcaaaaaactttgatccgaggcttttattctcaatcatagttacaacctcctaaaacagtttataaccggtaaatttatctgccagccagtaaccaaccgtaatcaacacaaggctgatcacagatttgaataatccaacagctgttgccagtgaatactggagattctgcaaaccggctctgtatacccatgtgtcaataatatcacctgttgagtaaaccagcgggttatacaggttataaatctggtcgaatcctgcattcaggacatttccaagagacaggatagccagaagtgctactgttgttttgatacccggtaaagttacatgccagattcttttgaatcgtccgcagccgtctactgccgcagcttcgtacaacgatccatccacgccaaggatcgccgcaagataaacgactgtgttataaccgaatcctttccagatatccgtaccgattaccagaggctggaaaagctttgcttcgccaaagaagttgaccgcatcgcctccgaacaatcctatgatctgattcaccggtcctgtatacccgaaaatattcagcacgatcttcgcgagaataacccatgacagaaaatacggtaaatatacgattgtctggatcggacgtttcagtttcttcactgccagttcattcaataacaaagcaaagaccagcgggataataatatttccgataatcttgccaacggcaatgacaactgtgttgcgtaaaacctgtgtaatgtcactcatctgaaacatatactcaaaattagccaggccaacaaattttgaatggagaatgccctgtccaggattataatcctgaaaagccatgacaattccgaacattggaacaatgctgaaaaagaacagccacagtaatgcagggatcagcataatgtaatagtgtttcacaaatcttttgatgtacatgagtaaacctcccttcctttatggatagtttatcctgtaatcatatttttcactagacgatattgtttcagattccacagtcttttttttaattcaaaaaaaatgtccgaatcaaatcgaacatttttttaatcttcctgcatattctgttggcgtacatccgtattcctttgaaaatacctttgtgaaataataaaaattgtcatatcccagatccgatgcgatctgggtgatgttttctgttccttttgccatcttccgggcagccgcctgcatttttctgctgatcacatagttatgaaaggtatcacctgttatctccttaaatctcgtgctgaaataacttctgctcattccgatctgtgttgctacctcttctgacttcagattttcttctatatgctcgtctgtatacaggatcactcttgcaaacatataaatatcctttgttttatcagtctgcagacacgtccgatacagattctccttccagttttttacccattccagcatctcgtccacagaagataaggatggaaattcgagttcttctcctgtgagtttctggaagctgtggaaactttttataaaaactctttcagcagtccgcagctccacgccccgggttatctcgcacagtctgttgaactcacagtcattaaagatccatctggtattcgtccacgctttttccagccttttctggagtccggaatcctccttccgcggttcttttttcgactgattttccttatactttctttctacaagttccagaatctggtcacactcatccccatcaaagcttattttggatatgtaatccagggctcccagtctcagggcactctgcgcataacggaaatcttcatacatagaaaagactacgaatttcacctccggatattcctttttgcatcttttcatcagttcaattccatcaatctccggcatgtctatatccgtgaatacaatatccacttcattatccttcagaaattccagtgctttgcggccattctggacatcccccacaacttcaaatccatatttgccccaatccattatagaaatcaaaccttttcttgccagtttatcatcatctacaaccaataccttcatttcttcataccctctttttccgtctcagatcctgtgaatttgattttattccgaagttcttcctgaatcggaatcaaaattgtaattttggttccatagccttttttgcaattaacaaacaggttcgtctctccttcataaaaagattccagcattgcttttacatatcgcagaccgattcctctgttcccatgctgcatttttttcacatcataatcaaatggttcattaatctgattgatctcctcctgggtcaggccattaccgctgtccaatatggtaatgatcgccagtcccctgatattatcctcaaagacctgtatggtgatcttttcatcatctccaagtccgtaccgtatcgcattttccaccagtggctgcaacagcatccgtaccgtcggctgttccagataacgcccctcttccacattcatttctattacaaaatcatagcgcatctgttccagtgcaatataatctttcacaatatcgatttctgttcgaagtgttgtctgcattccttcttttccaagattatacgacagcagtctttttaagcgctgtacaaattccgtaatattgtcctgacggctcattcttgccatccactgaacggaatttaacgtattgagcagaaaatgtggattgatctggtacaggagtttctcatattccgttcgctgaatacttttttctttttccacaacatcatctatcagattcctaatctgttccttcatctgttccacttcgtgcatcaggtcatcgaattccttgatcccatactcctgttccgcctcttgtaaagatccatttcccacctgaatcatctgtttttgaaattgattgaggggtttgcataccaaccggtaaaggtaaaaaaccgaactggaaaaaataccaaaagctgccaggatgataaccactaacttcagtctccacatattcatttctttctgataggtattctccggcagtgcaatggcattgacatatccgatggaactgcgatacgccatgattttgtatccttcctgatttatcgcagcatatccttctttttccggtaattccgacaaaagcttctgtcccttgacgatcaccggattattgctgtactgtacaataccattttcatccatctccatataggtatatggccatttttctttattaagccgatccgaaacgctcatatccggctcgatttctgcataaatatccagtacccgtttgtttccaaaggaaactctccgcatcacggatagtaccggcgtctccctgattcccagataggatgcatgcatggcctgaatgatgttctcggcacctactactactttagaaattgtctgatatgacggatccagaacccttacgttaaaattcccaatcagttctttttgctctttcggatcgtaatatgcaataccaaggagctttgtgttcacatatccaagttttatcagttcttctctgagagatttctgctcaaaatatcgatcatagttatcttccacactcagatagctttctgtcacacttccaataagcccgttgggactcatctgattgacaataccgatcatgtcataataatcactgtctatctcccgcgtgatctgctccagatatatctgcatactctcctggatactgtcattctggatcattcggatcgtcatatacgacacgatcactaccgcaagaatacatgacattgcacagagcagaagaatgcttagcatctttcttttaagtgtctgttttcctcgttttcttcttttcatatcagattctcccactcctgttctatcaccttccatatcgccgtaaggctgcagaacagttaacctttttatcctatttaaagaatatagaacttttttccgaaagtcaactgtttacaaactatcattctcatcgaaaaatcaaagaacagcaaaaagtccatggagatagtttccttttagaattgagcaactacatgtaattctaaaaaacatctccatggacattttcaattaagattatgacaatttatgtaactgttcagtaccttcacagttaatggctactgaatagttaccaatttatttacctattcaggtgcttcctcaagttcttcaaaggaaggaatcgacggctgcgcacccttacgtgttactacaatattagaaaccctgctggccagttctactgcttcgtccagagaatctcctcgcgataaagcaactgccaaacctgccacatagctgtctccggcagctgtggtatctaccacatggactgtcttatcagcatacagccttttttccgtatgatcttctttcaaaagataagagccttcgcctcctaatgtaacaactatgttctttacacccttttgttgcaatagcttagcatttgtacacagattttcctcatcactgcattcctgcaacagaatggcaagttctgtttcatttggcttgatcacatccacacaggcgaacaattcatcaggcagatcagatactgcaggtgccggatccattattaccgtttttcctctttttcgagcttccttcaccgcatacattacggtttccagaggaatttcaagctgtactactataatatcacttgcttccagcaaatccatattttccatgatatacgatttgtctacatgtgcatttgcgcccggaattaccagtatgctgttgtcgccttcaggtattacgccaataacagcaattcctgtagacacgccactcaatttgcgtatacgagaaacatcaactccaacactctccagattttcacacaatctttcgccatatgtatcctgtcctaccatcccgagcatcgccacgtttccgtgcattttcccaatggcataagactgattggcacctttcccaccaggcacaagttcaaaattttcagctaaaatagtttcgcctaccgtcggtatgtgcgatacgtcggcaacgaaatccatattcaggctgccaatcacgagtatttttttcatgttgcttcttactcccttccagttattgcaatatcacgatacaaacagtgacttcctttctcaacagatatacctgcacaaccggtcagcagtggcaaatcggaatctgtaaacttcagatactctttatcatttactgatacgctgattgttgagccatcagccgttaacgaaatcttatactcctcatccactttccactcaaagtctgtctcacacagtgtagtgtaaccgtagtaatttttccgtaaaaccaacttattgttcttggagaaaccggctgcataactacgcatagcaccctgcactcgaatgttcacaaaatgctccgtaccggttacaggttttaagacggctgttacccggtaattgttccacaagtgatgtcctgtatacatttccgcaaaatccgcacaggaaagactcagatactgtccacccagataactatgtcctttgagttttgcaaactgcggaacttcctgatgtgtaacatgccaactgtcaagcttcattcttccaaaatccagacgataatccggattaccatcaatatacaggtcgtctatgtaagctgccacatctcccatagcaaatcccttagccacaccacagagaataataccaacctcactgatatgaccggtctgtccaccaggaatctccagtgaaagagcatgccactcaccatcacctttaactttttctccgcgaattacttctccggtcactccattttttgcatagatttgcgctgtagtagccatttccgctcccggaagcggcattacactcaaatgcacggtctgtcccggataaaccaacggagcaaagaacggatcataacgagaatcgtcgaaatccccagaactataatacgtctgtttatagaagaaactctcttctccggatgctgtcactgccgtcaatttaagagaacgttttcccgtataagcctgttcgtctgtgttgcgtatataacagtttcccggtgaataacttctgatcgcatgagtgctggtcggatattcaaagtgacaactatccattctttcattcaaaattgtattccaattctccggtatttcctctccagccaaaacataagccattttagcgaaatagctggcaccaaacggaatatcaactgcattcaaagaaggtaacacatttgaacatgcaaggaaatcattaatcggttttacccatttgtcataatcgattccatcgatacctgcgaatacacccatgatagttcctacattgccaacattacagtctgtatcccaaccacacatattgcagatattaatcgtatctgaaaaatcttcatgaccatacagcatagacaggatcataaccgcagcattaggtatgatatgacaggttcccggatacttatcatagccaaaattctcaaaaatgtaattgaagcaatcacgccagttctccggatgctcatcatgaaacttcatgactgcctttactacacgggcatattcacaatcactggggatgtactgaagcgccttctcaagaatatcgcgaatactcttttccacaaaagccagactaatgcaacatgcaacatatattccaccatacacaccgtttccaccatgtgtaacgctggctgcctgcctggcaagttttgctgcctgctccggatttcccggagaaacaagtccccatgaatcaataaaaatctgaccgccgatttgttccgccatcgtagcaccattctgctctatactgccacttctcggtgcaggaatgccatttctaagattcagataagccgtatgctctgttgaaacaccataaccaccccaccagaagaatccgtgttcatacggtgcatagtttaataacgcattggctacatctttggaagagaagttgttcaaatcttcgcaatcttccaatgcacgaataaaaaacagcggaccgttgctatcatcatcagcggcaaagttcttataatcagcaggataagaccacacttctccgaacacatcgcggatgcgctgatatgtccaaccttcgataggcgctccaagacgaataccaataatctttccaagccatggcatacaagcgatgcttttattagtgcttttgcatcctatctcctctatggttatgatttgtgcaccgctattaaaatcgccacattcgctgctggtttttgtatttccaggcaaggagttgttcctgcattaatagaccaaacctcccttgaaaaatatataaataatgtttcgcctgatcttttgaaatagtttagataaatcatagttctaacattaatttcattttcaacatcgataattaaacgagcataactaaacagcacatagcacatttcaagaaatcgagtaggagaaaattcctcttgatgaggaattttcgacctctcacaccaccgtgcgtaccgttcggtacacggcggttcaatcaacttaacatgtaacacacctttcagtgtaataatctaacattgagattagtccaaatgaggctaatctcttgtttgttattgctatatttacagcaccacagctacatacatgagcataggctcttgaacaataaccaactttgtatgctgtaatcctgtcaattccaagcttcatcaaattctttgcacgattctgcggagttttccagtgtttccatatgcacatacgaagtctataccgaatatttgcatctaatttcgcacataagattttcatactacctatcttgaagtagtttatccaacctcggataagctgattgagcttctctaccttatagctgttgctgacgccccaacttcgacaggtgagtcctttcattcttttcttaaacttcgccactgattttgcatgcggttttgccttaaactgatgtgctcttgaatcaaagtagaatccaaacccaaggtatttaagtccacttggtctatctactttgctcttagtcatgttgactttgagccctagtttctcttcgatgaatcgtgagatatttctcataactctgtttacagacatttcacttccaaccatgataatacagtcatccgcatatcgtacaaaattaagccctctcttttccatttccttatccagttcgttcaacatgatgtttgccagtagtggcgaaaggtttcctccttgcggtgttcccacaatagagtcctcatactcatcatctatcatgattccgctgactaggtatttcctaacaatagagatgacatctccatctttaatcgttctaccaataatagtcatcaacttatcatgatttactgtgtcaaagaacttttccaagtcaatgtctacaatccagtcattaccatcattcatcatatcaagtgctgttaggattgcttgctgtgcacatctattcggtctgaatccgtagctatggtcatggaactgttcctcatagattggtgttaagacctgtgcaatggcttgttgtatgaatctgtctgttactgttggtactcccaggtttctgacaccaccgtctggctttggtatctccactcttcgtactggttgaggtttatattttcttgtcctcaactgttccttgataatttcgccgtcctttacaagatgttctttaagttctgtgtacttcattccgtccactccctcggcacctttatttcgtacaacttgcagatatgctctgttgagattatcgctggatagtatctgcttcattagactacttgtgtccatgcgttctttcctttccgtctcgcttgatttgaccacccttttcccgattggttacggcagatgttgtcatttctgcaatacgagacatactcaaacttattgattgttcgccccttcgctccatctccattacagagacttcttcgctactatgggctcggctgacttctcacagttcgttgttactaggctaatgaaacctctgtgagacctccacgcttaaggtgcacgctctttcctctcatatatccgccacatttactcggttcctacaaacggcaactttacggctttgtcttatttagcagacttaccaagcggaacctagcctcatatgtgatttctgtccgtcggaccaagagtttgcttacagcttccttcagattctaccttacgatagacacccttgctgttcagctatacacttccttgtcgcctaggcgtgttcgggactttcacccgttagagcgcgcccatggcgcgcaaactaaaaataaggctgctgccatatcctcggaatcttctctcccgaatggcatcagccttctgctttatctttatttcttcacactaatcaacatttacactcatactggtcttcctctctaggttgtactgttagtgcctatacattctcattaaggtataaaaaatcagggccgcaacaccaatactctggttctcaaataccacacttccatctataacccccagacagattttcttgcccgaactagagcgtgtttgaaaaacattttaagttgttcattttaaccaaattaatattgaaacgatacataagaagcctaagtaggtgaatgctaatttatcataacgtgttgctattcggcgaaatgctttcaatttcaaaaaataattttcgaccagatgtctttccttgtaaagccaccaatcgcaacaacggtcaaatttagctcctcgacgggatggaatggtcggctctcctccgtggtcgtaaatgtaatccatcagttgattactatcgtatccacggtccgccagaaccttgctgccatctattcggatatgatccaacaaagggattgcgtaattgatatcattacgctgcccttcactgatcataaaatacaccggatacccataggcatctactactgcatggattttggtactggctcctccacggctatgtccgacttcatttgggagcccccctttttagcacctgcactatgctggtgagcctgaacaatagaagcatctatagatagttcttccaattcagcttccagacttagaacgcgaaaaatattatccagaatcccatcatcaatccatttgcgaaaacgactatatacggtttgccaggatccataacgttctgggagatctcgccagggtgcaccactgcgtgccaaccagaccatcccattaagaatgatgcggttatcttttcgtggacgtccctgtttccctgtattttcaggcgggagtaacggtgcaatgcggttccattcttcatctgttaactcatatcgtctcaacatagtgaacacccctttttctttattttatcatgaaaaagagaaatgaaacatgcgttttgtgcaatttttatttttcaaacacgctctagtatgattctgatcatgatgagaagaactactgattagaatgagcagaaagtacaagtcaagtaaaggtaaacgtcaaaccactcgcctagtctaaaagtctcttttgtgagatactctaaaaaatgcaaaaaactattagttttttagaggaggcttaacttatggatcgtatcactcacgatatccgccgttccaactggctggagatcttaaaccggagccagcaaagacctgtgcataccacaataaagcaatggtgcctggataacggtatctcagaaaaatcttattactattggcagcggaagttccgtcaggaagcagccggacaggtttctgttccatctgctacagattctgtgcctgttacatttgcagagattccgttcgcatacagggataaaccttctggatctgctccaacagatactgtagcagcagtccagccaactgcggtttttaagtataaggatcttaccgttgccgttaccaacgagatctccgataccctgctttcgaggatcatccgggaggtgacccatgcttgaagatgctgccgctatccggaaagttgtgatcgcgtgcggatatgtagatctgcgcaaaggtattgacggactgtctatgatcatcggtgacaggtacagacagaatccgtttgaaaaaggcaccctgtttttattctgtggcaggcggtcggaccggatcaaggggcttctctggatggggaatgggttcctgcttctctataagcgtctggaatccggttccttatcctggccccgtacatcggaagaagcggcagagctgacagaggagcagttccagtatctgatgctgggattgaatccactaaatccgaagatcaaagatgtcactccccaaaagcccggctgatctttgtgcaaaaggctgaaatttcccggtctgttttctggcttttccgctcggaccggaaagccctcaatcctttgaagaaaaggttgtgacaacccctatgctccggcatatccgctttttccgtttttttgtgcatgaccgttgcctcacttctgcacggtcacaggcataggcagaatgacggatagcggatattttgccgttcgcttttttcccagtcatccggtataatgggtacagagagttaaaggagtacgggaaatggcaaaacatacactgaatgagctgggaaatatgagccgcgaagaactgatcacaattatcctgtccatgcagggacagctcgacgcactgaatgaaaacatcgaaaagctgatcgaacaggtccgtctcgcgaacagctaccggtttggacgacatacggaaaccctgaaatccatcgatgggcagctatcttttttcgacgaggcagagaccctgtttgatgcctctgcacaggaaccatctgttgaagaagcggtcgttgtgacacgcaagaaaaaatccaaaggccagcgggaactcaacctgaaggcatttccggaagaagctgtaccggtccattccgtgtccgtggagcagctggatgccttctatgggaaaggctgctggcgcaggatgccggatgaagtctataaaagactgcggcacgagccggaatcctggacagtggaagtccataccgttgaggtgtatgtcgggacagatggcgaccatcaggatgaatttgtgagagggaaccgcccgaaagacctgctgcgcaacagcattgtgaccccgtccctgcttgcttccattttgaatgtgaagtatgtgaattcttctgcactccaccgtgtagagcaggaattcgagcggaatggcgtaaacatttccagacagaccatgtcgaactggatcatcaagtgtgctgaccgctatttcgcaccgtttgtagagcggatgaaacaggaactcctgagtcttcccgtcacccaggcagatgaaacaccgacccaggtgatccgtgacagtgaccacccaaacagcaagtgctatatgtgggtgcaccgttccggtgagtttcataaagagcgtccgatcgtggtatatgaataccagaaaggccgtgaccaccagaaaccgctggacttctaccgggattacaaagggatcctggtaacggacggtctacagcagtaccatctggtggcgaaaaaactgccggatgtaacaaacgcaaactgctgggcccatgccagacgtgattttgcggatgcggtaaaggcaatggataaaaaagctccatcggtggtccgggagtccattgcctatcaggcattgcagaagatcgcggaattctataacgcagacacagagctcaaagggctcccgtgtgaagaacgtcttcaaaaacggcaggagaagatccggccgctggttgaggaattctttgcgtgggtaaaagaacaggctgcccgctgtgtcgtcccgcccaagtcaaagaccggacagggactgcagtatctgatccatcaggagccgtatttaaaagtcttcctgacggatggggatgtcccgatcgataactctgcctccgagcgtgcgatccgtacgttctgtatcggaaagaagaactggatgttccataacacagccaatggagcctgggcaagcgccctgatctacagcatatcagaaacagtgaagctgaacgggctgcgcccgtattactatttcaggtatatccttacggaactgccaaagctttgtgatgaacaggggaatctggaccctgcggatctggaacatctgatgccatggtcgccagaacttccagaagagtgtagaaaaccacgccgctgatgaagcggcgttcgtttattcacaggcgtatggtttgacgtttacaaaacgcagatagtaaatctacccaagatttaagcgcttacgatataccagcttatttttgctattaaataaatatggcttaacagcagaaaactgccgtcaagccacatcaattatcatagaagatctgaatttacagaaaaaatttcacagcgtccatttggtgcatgattacattctaaggatatagaataaaagtttccaccaccggaatggtggtttcctcaaaaacggatttacggtttcctgagtccggacagcagggacacggagcccggattattcaattgtttctacgtaataccctcttgcccaaaatgctttatcccatttactttgcaattctggatgtctatcataaagcattaatgtacttttcccttttaagtatcccataaaatttgcaatactaattttaggtggaatagctacacttaaatgtatatgatccacgcaaactgctcctactatattatccacatctttgtatttacataacgtgcttattatttctctcacatcatttctcactcttccatacaaaattttctttctgtatttcggaataaatacaatgtgatattggcatttccattttgtgtgtgataaacttttattgtccatatggaccacctcctgtgattaagtttggcttacgacaccattcttaatatatcacaggaggttttttattgatatcctcaccgctttcagctattccattctccccagcatagctgggggattagacttttcatttacatcccttttcccaatactaagtttacatagaatacttatttggatttaataaccttattttctgaatcacaaaatcaatcatctcttctttaatgtcatacattaatttgactccattcccctcaaattcctggttattaatccgcttttctatactttgatacatggtacgaaaatactctgtcgcaatattaaatttgctcattcctaaatttacagcttctttcatctgttcttctggaatatcagaacatccatgtagtaccaaaggaatatttaccttttttcgtatagcataaattctttctaaatctaaattcggtgttttcacatacggaccatgagcatttccaacagcaatagcaagtgaatcacaacccgtctgttccacaaatcttactgcatcttctactttagtataatagttcgtattatcaattgcgtcaatgctatctccatttccaacatgccctagctctgcttcaacgtcaactccaaacaccttagccacacgcaccacatttttagttagttctacattttcttggaaagatttcgttgaaccatctatcataactgaaggaaatccatcccgaatccctcctactgcaatttcatatgttacagaatgatccagatgtactccaacaggaatagatgctttttctgccatatcgcaggctgcaaaagccaaatgctttaaatctgtgtagtctgaaaatccgggataaaactgaacaattatgggaactctttctctttctgctgcttctataacatatttaacagtttcaatatttaaagtattaattgcagcaacaccaaacttattttctgttgcatatgttaaaatatcttttacttttgctttaggcatattcttccctcctacaatgcacactcttcaattttactatctaaaattttcatttcctcttctgttaatttccagtcgaatgtcttacagttttcatcagcatgctcaatacttctaacgcctactaaagctgtacctacatattctttctgggtactccaatttaatgcaacctgtcccactggtacattatgaccatctgcaatactatccattacttttagcaattccataatttttgaaaatttgggttctttataaacatcataaaagtttaaacgcaaatcatttttttcaaaagaaggcacacttcttatttttccagaaagaatgcctgctcccatagaaccatatgtcatagaatcaattcctctatcatatccccaagacatcaaatcttcaaaccctctatcgaccatagaatataatggctgctgtacatcaatctgaatatattgttctgcttcttttatctgttctgccgtaaaattagatacaccaacataacgtatatagcctttacgcttcatttcctccaacgcagccatagtttcatctataggcgtatttacatctggccaatgaacaaaataaaaatctatatagtctgtttccaaattcatcaaagaactttgaatttctctcatagcatttttataactcgtatcttttttatatccatgtgtatagatatccggaatcaagccaaactttgtggaaattaacacctgttcccttggaatttctttcaaaacttctcctacaattttttctgaagttccatttccgtagcagggagctgtatcaataagatttactccattttctatcattcttcgaattgcacaaatagcttcgtttttatccacttttccatagttttgacctccgattgcccaagtccctaccgctagctgtgatacttcgatctctgcatttttaaattttttatatctcattttttacacccccttgtaatccttatctgctctcctgtttccaaccttctactcaacatatcattcttaaaagttcttccaggtagcatacaaacaatatgaacatcttctttatctactggatactgtgttccatgaacaatcagcgggttcaattttacgaatgttccctttggaacataaaaagcttctatactttcggttctaaaatcactatccataattcctacaaaaataatcacatctccatctagtggaagaagtccttcacatgcatattgatgtgcttcgagaaaagaaatgatattctcgctttgttttttaacatggcacacagaaattgtaggttgattaccctggttaaattctaacgctaccacatctgcaaaaaaaccctcctgaaaaatagacttctttttcagttcactctcatctagtaaatctaaaaattccccatattttccaaaattatcttttgttaatttttgtacctgaatctctctcataatacctactcctataaactataaattccttgctcatgagcattatcaaaatgaattcccaaatatctagatacctctctcaaaacaggtaagtagtgaccataaacacagcctaaatgatgtatgtatggaccaaacattaacttttcttcccaacgtttccagttatcagtttccatccatacataagtaccattcgtctccggtcctgttgtagttttggcttcccccgcaaataaataatattctccatctacatcatcgaacctacaaactgttaaatcaccttgttttaattcaaagcgttcttgtccatctactaattttgcctctaccccatcttttttcaaagaataaggaaatggaccgcaatgccataaaagttctgcattatcattttgaggatgacgaatagtcaaatctgctaaaaattctgattcttcaaataaattacaagctcttaagattgccagagtaatggctccatttatatctgtttcacaggaaagaggcattccattatctgccatttctcccaaaacaacgcaagggcacaaccccattaaagttggaaaagcagaccagcactcaaatgctgccacagaacaattgttttcttccattaattcctgaactgctaattttgtcgcacatatttgttggtaattttctccatcagggaattttctcacaaattcctcctcatactttatatattcttttcctttctcctctagaattttcctagctctgttacaaatttctactggtgaaatagggacagttgtaatgccgaacctcttaatcaaatttgcttcgttagtcataacactcataaaaggcactggacgttctcctattttagcaattcgcaaagtacgaagagattttaaaactgctgctgttctaataaatgtttcatacccttttaaaaattcttcacttttcgtagtacaattataaatgtaactgtatttcaaaccatagcgctgtaaaacctttgtagctgcaaacataccgcactgtgtatctcttcccctagcctcatcagtattcggcctttcatctcttggtccccagatcaaaataggtactgtaaatttagaagcaatcgctgccactacttgttcttctccaaaatcacagaaaggaaaaaataatgcatcaatttttctatttttcattttatccacaattgcgtttactttgtccatttcgcaaacaattccattctcgcatatatcatctatatccacgatttctactatagaagctttaatcttccgaatttcttccataaaacaatccttctgacgttttgcttccaccatactcaaaaagcttcttttatttggtactacacccaaagttaaagtttctctatacatactctatccccctaccatacttttttactctttcatcaatttctctgtaatcaatctcgcctgtttctaaaaagttatctgttacttcccaattaggaattcctgctctccctccaattctggtacatttgatggcagctactccacttgcgaatcttgcagcatctttaggagacaggcctttaactattgcagctaagaaagcaccatgaaaaacatcccctgctcccaccgtatcctttacatctacatcaaaagcaggaatttcaaaaaatccttctttgctgatccccgcacagcccttttctccgaatgtaaaaatcacaatttctggtcccttattatataaatattcgcaattttcttttacactttttccagcttctaacatcttttcgtaaacaaattctgagccaataaatatatctatccaagaaatagcatccaacaattcatctgtataagagtcagcatccataaaaattttgcttcctttttgttttgccatttgagctgcttttttcgtcaccgaatccaagttggccatataaaaataactagaatttgaaatatattctatattcaattcttcctctgtcatacattctgcatttcctggataaaaaacaaaacttcgtcccatagaaccttcgtcactaattacaatatcaaaattagttgttctattttttctcacacacatttgttctgtatcaattccatggtcttgaaaatctctaagacaaaaagttccatatttatcatctccaacatttcccattattccacagcaaagccccaatcttgccgctgctaccataccggaagctacttttcctcctccttgccaactcaaattctgtatcctctctgctccattaggttttggaaagcacctaacatttactgcgagatctacgcaagggctatccaatccgatcacatcaaatttcacacacatcccctccatttctttgctctcgatttttccagaaatatacaatcaaagcacatatcgtcattaaagtagtaattcctgccataagtaaataccctttttcatatcctagtaggcgaattaactttcctcctactaaatttccaacaatggctcctaatccaagctgtacaacatttagtatactttgtccttttgtttgatatttttcatacacacaagtactaatatataccgcacaactataatacatagtcatatatgtaactccttgtaacagttgagccaaaactattccaataattccacttcttattggaagaagaattctaattcccataagaaaacaagataaaaataaaatctttattgttccatgctttctaagcattctgtttatataaaataacactggaacttcgcttaatgctgaaatgctatttataaccccaatggttgactgtgtgtaacctttttctagaatatacggtccaataaacccgtataaaaactcaaacccatctgacttacaaacgctaatcccaaaactatatacacatctcgatttttaaatatcctgttttgctcattttcttgaacaacttcatttattactatctgcccatttctttcttcttttaatcctatacaaaaacaaaacaaaatcatataggcgaaaaatgcaaatacaaattgcatctgaggtcttgtctttaagtacattcctgcacaaattgtcataaccgcatatcctagagttcctccaagacgaataattgaataggaatatccttcttttaaagagcgagcaatcaaaattgcgtcacttaagggaattacggctgtggtaaaggaagttaccacaaccgttgcaaaaaacatacaaagaaaactatttcccagatagtataaaagcatgctaaatccacttcccactattgtaaccagaagaacctcttttcttttacccgtcctatcactaatttttgcccaaaacctctgtgttagcaaaacaacacacggaccaatcatcaaaagaatccctatcttctcagcatcaattcctttctgtgcataataagcagataaaaaaggggtataaaaaccgctggcaatataaataattgcatttatgctgaacagatataaaatagttctctctttattcaaattttgccttaactcctttttatttttctaaagcaatcttatagtatccttctttttcctttttgatctcccagttctgtccatttaccacagcgttgtccaaacatttttctgcgtatacagtaaaatagctggcatccatatccgtgtttataaacaaggttccctcttctatctttgctttcaaattctgtacgttaccatcatcaatatacgtgtctctaatttcatcttcacaaaataatatgacatctaaattttcgtacttttcttcaatattctctggaatcttggttaacattggaatcattttattttgacgaataaacactggaatcttatctagttcgatttttctcttaacccatctaccgccttttattctttcatgcgtaaacaaatcaatccattgtccatttggcaaatatacatctatttcatcctcctgatcaaatactggtacaaccaaaagagaatctcctaggaaatattccaactctacattacgggcacttctatcctctggatattccattactactggcctaattacaggaatatctgagaggtgtgttttataagttgtactgtacagatacggtaataataaatgtcttatatcattaaatttcttaaaaatcttttctgctttttctccaaaattccagggttctcttggtgttttcccatgacatcggctaagtgaattaaaaaatccaaactgacaacttctaatatactcctcatctgtaggaacacattcatacccttcatgatctgtattatagaatccccccatatcaaatccccaaaaaggaattccactcatagaagcacttaagcctcctctaagaatacatgcatgattatttaaatgggtagatgaatctcctgcccacgctgctggaatagtatgagagcctgcatatccacttcttccccaaagcattggaagttctcctaaagggattttcacctctgccataatatcataaattgttttggcatataaaaatgttagtttattatgtccctgaattcctgtagaaccatcaaaataaaccgcatcttctggaacagcttctgaaaaatcagtttttactgctccaatgcccatactaacaactgaccttactttaggcttgtaccactctataaaatgtgggtttgtaaagtcaaagcatcctacctttgaggtacttgttgccgtagaataaaatctgcttgtaacaccttttgtattttttaccaaaaatcccttttcttctgcttctttaaaatattttgaattctcatcaatataggggaaaatccaaagacaaaggtggattccctccttttttaacttgtaaatcatttcttctggattaggaaatctttcatagtcccagacccaagcgcctgcgtcaccttctttctgccatccatcgatatgtattacatcaatcttaatatccctctctttagaaatctttactacttcataaatttcatcttgagtttgatatgaacattttgacatccaaagtcccagagcccacttgggaatcataggaatttttccagtttgatttatataagactttaagagtgccttataatcatttcccatccaaatgacatagtctaagactttatcttctacgctcatgttatatgccacatttgaaaaactacccatctcaaatttcgaccttgtataagtatttaacagaatagcatatcccctactactcatgaagaaaggatgatttttataagatttttccgtattcgtgcttagagcatccgtttgccaacaattaatagtctgtcctctcttaccaaaatccgtaaatttttctccgaaaccgtagaattcttcatctgcatataaatacattgtttcattaacgccaataatctctttattttcatcataagtgaatcctacaggcaaatttttacacatattatccacattggaatctttaatctgctcttttgtttttaactttccatcaagataatagctaacttcccacggatatttcctaaccctagcttctatcttccctttagatatagaaataaattcttcgttttccgttatatttacaccattctgtccttctaactgatatatactattatcaaaaggatgctcatttccaggcgtatacatacgaaaacgaaatgcggtttccccaacacattgaatgaacacttttactgtgttctctttgtaagtatctactacaaattctactccatctgttctctctgtataactttttatacctgttaaaaaatcaaaattgtgatggaatattgtttgtaaataccccaactgtggattatagcttacttctacttttttacccatatgttacctcctaattacctttcttgactttcttgaatttgattttagcataataaaggacgcaactttatgaatatttttacttgcaaaatataactttttttccttatttttactcgatttttttcctcgctcgatactcttctggcgttaatccataactttttttgaatgattgaatgaaatgagaaacgtcattatatcccacttcaaatgctataaaactaatcttcatatctttattttctaacaatgtttttgccttttttaaacgatattgaattaaatatttcgaaaaattcattcctgtttcttggctaaataatctactacaataagaataattcacaaaatatttattttcagctaactctcttaaagaaatatttttataataattattttctacataatgaacaatttcttcaacaattttactttttttctttgtattttcttttccgctacatatcactattaccatttctttcagatagttttccagctcctcaatatgtttaaatttgtacaaatcataacgtctggaaaacataacttttatatcttttaattcttcaatatcctcatcttgatataattctgcataataattccctagaattttcaatatttctacaactgccatgtacagtttctgtgcactttcttctttaatgattatatcctctaaaatactgtgaattacttgattaatttctttttcttttctagttcttactatagattctagcttaatttctgcttcttttccaattcttgctttatatccgtccatatttttataaaaatatgctctattccatccttgtatcaatctctgatttaaagcatataacgcctcattataagactgatatatcttctctttagatgaatatactagtcctacacccatagtgatattcatatgtttacatgtacaaaaatacgataacatactttctactttctcctgaacaatcagttcattatccatacattctattccactcaaaagcattacatattcctcattaattttagaaaaaaagaaatcctttatgaaccctctatatttttcctgaatgattctattcactaattctacatctgtcaccagttcttcttcttgcatcacaactatacagaatttttcttcttgatgtattgcattataactaaaaaattctttatacaattcttcgtgagccacgattgtcttcacagggaaataatttttggctgcctcccattgataataattcttaattttttcttgatttcgactcttctcttcctgtttctctaaaaccttttttactggtggcaaaagattttctttataaattggttttacgatataatcttttacattatagcgaagtgcctctcttgcataatcaaaattttcaaaggcagtcagaataagaacatctatttcaggtatatgtttatgtaaatatgaggccagttccaatcctcccattttttgcatttgtatatctgttataaccaatgcaatatctttatattcttctagtaattctatggccttcattccatttgctgcttctccacaaacctgaatgtccaaatcgctttcttgtaagattttgacaatactttttcttgcataatactcatcttctactactaatatttttttcatttatctttattctcctcttccagattttcaattccaagtaatagttgtatctccgttcctttatctgccttattaactttcactccatatttttctccatagtaatttttaattctagtatttacattatttattccaatacttttttcttcctcatcaatataagaaattcttcttgttctctcgcaaagaattctatttaattcttctcttttttcactatcaatcccacagccattatcttttacgagtattacaatatcattttcacatttgaacgccttaatccaaattttattgtcattttcatccatcgtaaatccatgttcaaaaatattctcaacaataggctgtaaaataaatttcacaattcttacttgctcaatctgtctttctatctcatattctacgctaaaacaatcatgaaaacgtattctctgaatttctagatatgcctttaccatttccacttccgtctttaaggaaacaaaacgactaccttttacattgtattgcataatacaagaaagattttttgtaatttccacaatctctggaaaatcgctaagttcccccatagaagcaattaaatttaatgtattatataaaaagtgcggattaatttgatatcgcagcattttagactgaatttttctttgatttttatcataaataatttctcttaccagatattcattcattttatttgccatttcattgtagttttctatcacattggcaatttctcttgttaatttcatatgttctaaatttataatttgaagttgatctcctttagtatggcttatttttttacaaaattcttctaatggttcaataattttttttgtataataaatagaaaaagaaaccactaatatcaatgctcctaagagaaatatactattccactttatcttttgatcaacctcctcaaacagcctttcttctggtattacttgaataattttccatccggaaagcatgttctgtctggaacttatataaaaattttttcctttactctgaaatgtatctactattagattttctttcatcattttttgacttttatcaaaaatatatcctttttcttctttctgatataaatcttctccgatatgaaacagttcctgttcccccgtcaaaataaaacactcaccgctatcttcataaaaagcattttctaaaatactttgaaatgttttatagttaatatcaactgctaaaagagcaataggcgtatttccatacgtgtgtaaaggatataaaaaagttaaaatattcgcgttatccccctgtaagcccccataataatattcatcctcttttccttcaaacagcatccactcttttgtcatgtttctaatggttttgacatattcttctggtatagatgtatccgtacaataaatgtttccatatttatttactatggtagctctcaaaataagtgtgtccatagaagcaatatgttttaatgcattgtccatgtaattctgattttcgaattttgtaccgatatcatttttttcattatttttcagcaaaatatttctagcatagttatccgtacaacaaatttgttttagtccttttatattatttaaagatatagtaatcatatcgtctatccgctccccagcggtcttcattttcaaaacttcaacttgtctaattttttttatattaattccatacacagcaagatttactatagaaattgcaacggttatcaccaaaatcacacttacaaaagtgcttctaaaagaacgctttttcatttgttactacctttctatcaattttttatcttctttgtaaagcaaaaacaggaagggtgtcagtaatttctgacatcccttcctaaatattaagactttacagctccttgtgtcaaacccgaaacaatatgcttctgcgcacaagcatatgctatcaacactggaatcatagcaataaggtaagaagcaaatgctaagttataatcaaacgaatattgtgatttaaaattatattgaaataatggcaatgtccacatatcctgtgactgatttaatattaataaaggcatttgaaaatcattccatacccatagtgcatttaacacaaaaatagttgctagaatgggtttaatcataggaagcactattttcacataagcctttaccgtaccacatccatcaatataagcagcttcttccaaatctctaggtacagacctgatataattcacaagtaaaaataccccttgagaagatgccaatgtaacacacataatgatcaagccaggtatattacataattttaattttgcaagatattttactaatggtaccataataacttgaaatggtacaaaaataccagccaaaagataaaaatacatagtcttataataccttttttccatatttcgtgctattgcataagaacacattggaatcaaaaccataataagaaatacagataccaaggtcaccactgctgagttcctaaaaaacacaaaataatttgctttttgaagaacatttacaaaatttcctaaataaaaactctgcggaaaggaaaaaaagctttgagaagattcctgtggtgtctttaaagcggtaatgatagtaagataaaaaggatagagaataactatcattcctgtaatcaataaaacataggacaatatctttaatattctgctgcttttacttcttttcatcttactcacctacctgtttattacttgtcaatctcagtgaaaatgccgatacaacccccacgattacaaataaaatcatagattccgccactgaagtgctaaattttccttcattgatcgcatggcgatatatcaataaccctactgcctctgttgactgtgcaggccctccattagtcataactttaatatagtcaaataccgtcaagccggcttttgcttgtgtgataattaccatatttaatactggaattaagtacggtataatcacattccaaaatcttgcccaatttccagctccatcaatcgttgctgcttccaaaagatccttcggtacactctgcaatcctgctataaaaagcactgtaggaatcgcacagccctgccaaatatttaccaccataatagcaatagccgccagtttaggatttccaagagggcttgtagacaacgcctctatattcaacatttcgcctatagctggaactgctctataaaataactcattccaaatcaatccaacagtgaccatgcttatgactgctggaataaaataaatagagcgaaaaagagtagataatctcctaattctgtttaacgccaatgctatcgtaagaggaataactataagaagtaccactaatgctatcgtatacccaatattaaaccatagggcttccctaaatctttcgtcagtcaatacttttacataattcttcaggccaacaaacgtataatctttagaaataccattccaatctgtaaagctataatacactccaattaacattgttactaaaaagaatattgtatataaaattacagttggcaatgtaaaagcaaacataatactattcttctttgattgtgagcgcatttcttttatttcagttttacttatcctcttcattcacaacaccttcttaacaatcacttagaatcttctactgcttgattccagtcatttgtcatttcttttaagaatgcatctacatccttatccaataatacattctggatttttcctctttttgtatcttcaaatcctgttggaggatatgctccatctgcttcaaatccatttgcttctacatagtcaaaaaatggctggaactgaggaacttccgcttttactcctgttacacaagatgggctcttgtcattatctgtataaatctgagccccttctgcagaaagtgcaaaagataaaaatttatcaatggcttccattttttccggttcatctgctacctttgcatttacacaaaaacctgtatctacagcctgtgttgcaatcggttttccattatcattcggaagaatagtaaattctacattaaagtctggatttgcactcaaaaatgatggtaatgtccaacttccttgaagaaacatccagccttctccgtttgcaaagtcattaatcgcctggtcataaccaagtgcaagtgaatcttcattagcataatccaacaattgaatcattttttctacactgcttttatattctggaattgtctcaaaagactcttctcctgctttcatcttttcaaattcgtcttcatggcttcctaaatctcttgcttcaatattagaccacaaattagaaaccgtccaagagtccttatttggtaaaataaatggtgtttctcctttcgccttaatttcttcagcaagagcaattaattcatcccatttggtaggcatagtatagccagcctcttcaaacttatctttattgtaataaactcccataaaattgacattgtatggagctatgtaattttttccgtcttttgcttttacagcatccaggtacttgctatctatatttttcatataatccttttctgataaatccaacagcaatccttcatcctcaaactgcacaaattgtgcatctgttggccaatgattcatcatatctggaagactatcactgctagctcttgtcatcaaaacttcctgagcatctggaaccacattctgtttaatgacaatatctgggttttctttctcaaatgcttcaattactttggtatagctttctgctgcttcacgttttacttgcacaaattcaatttctaccttacctgaagatttttcttcactctttcctgaatctgtctcgtttttctgtccgcatccaactgcaaacgttgaaaccattgccaaacacaatgtcactgccataatttttttcttcatactttagtcctccttaatgttttcgatagtgtcaaaaactagtatagaatgctcatggacattatactttatttacttcagttaattcaataccaacataaacaaatttgctggcttttaaattttatctgcagatatattccactcaagcagtgggctttcgatgattcctgcacctgcccgcgttgtgatgcaccaaaaccgttcctctacaagaacaactgttccaaatgacaactcctgtgcaagatttgcaatgccaggttctcacctgatgaaagcagattttccgctgtaaaactacgctgtccccactgcggcaacactctggttcctaattcccgtcactcaggtcattggacttaccaacgacgatgctgtctctacagaacatcgtccattcaaacagatgattgaacgactgaaccgtacttataaagcttcttaccaccatacaaattggttcgacaacatcgacgatgctaactatgatctggcactctgggtcgcttactataatttcctgcgtccacataagcatgcaggctataaagtcctcaatgaagtagaaatgcttcagggtgccgacaatatgcctagcaagtggcagcttctgatttttcttggacaacagaccattctgaacatacagaaaaatggtactgctgcatcggagcggaactgttgtcaatagaaccgtggaataccggaacagacggctttgccggctgcgaggataggctcgggcaacgccctaagccctcggagagcttattggaattaatatctgcaattttcaaggttcatcagagcctttttctttgactctgttttttcataaatcatttgacactaccatgtttccctctgatgaagaaaattatatcacttgtatatttttactcatataaattcttttactctatacactttgcatatataactttttttacatgtttcatttgatgaaataatatctataactgagcaattaaaattacaattaatacagctaaaagaacagaaaataaaaagagaatttgttgcttctttacaactcaagttatttttcaagcaacaaactataattgagcaaatattgaaaattgcacaaaattaccctaccatttcgaaaacggcttccagcgacgatccattttttataaaagcatgacgatttgtcaactgctctgttttccgttgtttctgaaaatatcggtaaccttcttcaaaggtacaatattgctcagaatgcatacaacacagataatgaaccaacgacatgattaaccagtaacgccgaatcccttttctggagcggatttgatatttatccagtgcaagttttcccttgctttgacgaaaaaatagttcaatcggccaccgcctgctgtacgtatcaaggatttcctgtgtggacagctccgcattagtggatataaacaccctcagtgccctgggatttccaaaagcttccttcggataactgaggatcactgccgcattttggatatcattgagttttccttcataccgatacacataaaattcacgtccgccaacggtcacaaggctgacgtccgtatctgtttttcgtaaatgaagggcaaaatcgctgacttttttggcggattccgaaaggatagataatccggttggtttttaatgccccaatggtgtaaaagcctttttggataaaactgtccataacttttacagaagtataccagctgtcacaaagaaaataagaaactaccggtgccacgggaagctcctgtgcaatttcctgtacaatctgaatctttgattttgaccggtcgtacaggataactgcataattcagaatgattccattacacgaaagcataacagaaacaacctgatgcccataatcctgatgcctttttaagtgagattgatggaaatacgctgcttcaattggatgcaaagcctgtgacgaaggctttgtgtgtgaagcaatagtatcatccacaatacagaaaatgggctttccggagcgatatgcttcctggtaaatggtatgtatcactctggctttcagaatatcctgaagtgcggagtcatcccatttgccatgattcagaaaataagcagttgttgttctgtgcatacagctgacttcagcaaaatcgatagtttttcctctgtaaccacgaaggaaaacagaaaccatgatgatcattaagtggtttaaatacacatcggataaaaataatccgagttttaaagacttaaagtaattgtaaatactgttagaatgatgtatactgtttgcaacaggcacccccttgttgtgtgagaaaattgttttgtggttattacaattatacatcattcaacagagggtgtctttattttgtgcaatatttgggatttactcatttatagctagttatcttctattatcttctattattttcttctttttttataataccatcttacagcaaatgaatatacacaaatcacaacatttgaccaactttttgtagcatgatggcaaccattcagcagccaccgggcggagactgagcagctgccaattttgtatataaatgcaaacataatcgttttatattattttttccttttttctatgctatactggtacaacgtttcataaataactataccatgcacgtaggatacggattcgagtgtgcaggtttaaaaacgcaggcgtagtgggctgcgctgaggcttttagacctgtgcaatcggattcgtagacaaatgtattgtgtaggtattttgaaaacgctgtattgtactgatagtgcctatacattctcattaaggtataaaaaaatcaaggcaagtgaaacgatgcagagtttggctattccaaaatatcactttagtttggacggattttcgttgacgttcttacaaaatttggctataataaaataacagtttagtttggacggatattccagctaaaattgaccatactataaccgaagggagagattgtcatggcatatatcaaaagagctgccgaagatacgattgcgcgggtgtcaaaaatgttccccgtgttgttggtaaccggtccaagacaggtaggaaaaacaactttgctgcaacggctggcggatatacagaaaagcgaaggaatcgagcggaaatatgttactctggatgatcctgatgtcagatatctggcaaagcacgacccggctttgtttttgcaacggtattccccaccggtgctaatcgatgaaatccagtacgcgacagagctgttaccttacatcaaaatgagtgttgaccgttccaaaagaaaaggcgatttctggatcaccggttcgcaggtcttccgtcttatgaaaaatgtcagcgaaagtttggccggacgggtcggaatcataaatctgcttggattgtctgatgcggagatttatcaggaaccaagtgagccatttcaaacggatgcagagcaactaatgaatcgtctgtctgttagaagcaaaaaagatttgaacgagatctatcgtagaatattcaaaggctctatgcccgaactctatgcagatgaatatgtagattgggaaacgtattatcgttcctatgtggacacctatctacaaagagatattcgggatttggcacaggttgcggacgaaatgcagttttataattttatgacgattgtggctgctcagacttcaaagcccgttgtctatgaggaacttgcaagtgccgcaggtatttcagcaccaacagcgaaaaaatggctatctattttggtgtcgtctcatatcatcgcgcttgtgcagccttaccacaacaatgcactcaaacgggtggtgaagatgcctcttatccatttcctggacaccggccttgctgcttacctcttaaaatggggaaatcccgaagcattggaaagaggtgctatgtctggagctttctttgaaagctatgttttttcggaaatctataagagttacctgaacgcaggaaaagaacctccgattttctattacagggataaagaccaaaaggaaattgacctgctgatctatcaaaacggtatgctttctccgatagaaatcaaaaaatccgcatcaccgggaaaagcagcgattaaaaattttaatgtactgaaacccgttaccaaagaatcggctttcgagggcctagagtccttgaaggttgaaatcggaacaggaagtgtaatctgcatggctagtgaccttttgcctgtggacgaaagaaactggtatgtgccggtttggttaatctaatctcgtgcaagcacggactttggctcgttgcctgcataaatcagggtcgccgcaccaatattggtacggcggcccgattcaatttttatagatatgtaataatctgtacatgatatttccttcccgcaaccagacgaatcagacattccagtcccatattattcataactattcagcagccacagggcagagactgagcagctgccaattttgtatataaatgcaaacataaccgttttatgttattttttccttttttctatgctatactagatcagcaaaattaatatgaaaggtcttatatttttatgaattctttaaagccaatgctgttaacctgtctgaagtcctatgacaagtcacagtttatcaaagatgtgactgcaggtatcatcgtcgcaatcatcgcactccccttatctattgcacttgcgctcgcttccggagttggccctgaagccggtatctttactgccattgtagccggttttgtgatttcagctcttggaggaagctgcgtacagattgccggaccgactgctgcatttgcaaccatcgtagccggtatcgtagcacgcgacggaatggacggacttatcatcgccactataatggcgggtatatttcttatcctgatgggactgttccacttcggaagtctgatcaaatttattccatataccattacgaccggttttacttccggaatcgctgtgaccatcgtgattggccagttgaaagattttttcggagttacttatccggatggtgtaaaaccaatcgagacaacggagaaaatgaaagcctttgtccagaatatttcttccataaacatcgatgcactgatcgttggcgttgtaagtctcgcaatcctgatcattgctccttatgttcttaagaaggttcccggttctctgattgcagttatcgtcggaatcctgatggttcagtttcttccactgaaggtatccacaatcggaaatctgtatacgatcagcaactctcttccgagttttcatatgccggcgatcagattcagcaccatcagtgcttctgtttcaaatgcatttacaattgcagtgcttgccgcaatcgagtctctgctatcatgtgtagttgccgatggaatgatcaacagcaaacatcgttcggatatggaactggttgcccagggagccggcaacatcgcttccgcactctttggcggcattcccgcaacaggtgccatcgccagaactgctgcaaatatcaaaaatggcggacggactcccatcgccggaatggtacactccgtcacactcatcatcgtgctggtcgttctgatgccttatgccggaatgattcctatgccgaccattgctgcgattctttttatcgttgcctataatatgtgtcagtggcgaaccttccgcgacctggtcaagacagctcctaagagtgacattcttgtactgatagtaacatttgtactgacagttatctttgatctggtcgttgctatcgagatcggtatggtgcttgcctgtttgcttttcatcaagcgtatgagcgaagaaacccatgctgacagctgggtgtacacagacgatgatactccggatatcgatgaacatctgcagaaattaccgctgcagatccgtgtttatgaaattaccggaccactgttttttggagccgctgatgccatcgaacatatcgttgtcaaagactttaccagctgtctggttctccgtatgagaggcgtccctgcacttgacagtactgccatgaatgcacttcagaatctggtaaaaacctgcgagggcaaaggaattacacttgtattctcccacgtcaatgaacagcccatgcatgtcatggaaaaagccggttttgtggaacttgtgggaaaagaaaacttccagtcaaatatatccgctgcattaaaaagagctgaagaggtcatctgaccttttcagctctttttgaactcatttgcaaaatctactgattgacgaatcctctattaactttatataatgagtatattagcagcattttaaccaatcaaaggagtggagtaactgttctatacgttacagtttacagatgaaccaacgacatgaaaaaaacattttttacaagggatccttctttttaccgttcctttttcaaattaatgacagtaatcgcgctgcaaaacctggtggcctacagcgtgaatatgctggacaatatcatgctgggaagttatagccagaatgcgctttccggcgctgcgacggtaaaccagatttattttatcgtaaatcagattgcactggcgatcggcaatgcattgattgcaatcagctcccaatattggggaagccatcagacaaaacccatccgaaaggtaacaaaagccgcactgttattcagcctggcaattgctgccggaattgtagctttatgtatccgaatcccggaaaaactgattggcctctttacgacttcaccggatatcataagagaaggtactatttaccttcatatcatacaatggacatttttattttttatgatcagtaaccttttactggccatgctccgcagtgtggagaccgtaaaaatcgcattccttatatccgtcatatccctgttggtgaacggtggaatcaactatatcctgattttcggaagattcggtgcaccggaaatgggaatcagaggtgccgccatcggaacttttgcagcacgcatactggaacttggcatcgttcttttctatgtatggaaaaaagacacaaaggtcaaattgtttgatgaaaaattccgggatggtattatcggaaaaggcagtggtactgtctggaaaaccttttttaaagtgtgtattcccatcctgacttccggtttgttgtgggcagtttcccttcctatgcagacagcgatattggggcatctttctgcggatgcgattgcagccaattccgtatcaagcaccttttttcagtatctgaaggtaatcgtcattgcgatagccggtgcttctgctgttgtgatcggaaaagatatcggaagcaatgacgaagaaaaagtacgctgcaacgggcgtaccctttctgtactctatctggctatcggactcttgcttggaactgtattattcttactccgaagtccactgttatccatgtaccgattgacccctcaggctactttatatgcagaccactttatgattattatgagtgtgatcatggttggaatgtcttatcagatgccggtcggagtcggtatcatccagggtggcggagataccaaattttcgatgtatctgaacctgatctccgtctggtgcattgtaatgccattgtccttcctggctgcattctactggaagctgccggtagaacttgtggtgatcgccgtgcaatccgatcagatctttaaatgtctgcccatattcctgcgcttcaaaagctacaaatggatccataagctgacagcaatcgactgatgcaggaggtattcaccgttactgttcgcgttactgttcactggtaatatcccgcgaggtgttttttgtgagcgaaggtcacagaaaacccgagacatatcgcgcgaatttatgcggttagcataaattctgggcatcgcgcagcgtgttgctgggcacggagtgaacagtaacctgttcacctcctgcatcaaatgaatatacgaaaatcgtcttgacacatctccccttttcggtatatgattaagtccaatataagggagtaacctacgtaagaattagcgtttgtgatgtcgtcagtacgatggaaacatccggtgtcacaagaaaatggtgagacttttattgcattttttgttatgcaataaaggtttcttttttttccgaaaagtccttcattgcatacaatatagtccttgaacaggtagaaagaggaggaaaacgttatgaaggaattttaccggcaaactgtaaaagaagttctggatcgtgtagaaagcagcgaagcaggacttacaagcgaacaggcaggccattcccgggaaaaatgtggctggaatgagcttaccgaaggaaagaaaaaaagtatctctcagattttctttgaacagtacaaagattttctggtacttattctgattgcatcggcacttatctctgggattcttggtgatgtggagagtgctgccgttatcgtgatcgtgattacgattaatgcaattttaggaacgatccaaacagtaaaagcggaacaatcgctgcaaagcttaaagaagctttccggtccggaagcaaaggtattgcgtgatggcacaaccgttcagcttccggcaagagaactggtggttggagatatcatcctgttagaggccggtgacatgattccggcggatggcagactgatcgagaatgcaagtcttaaggtcgatgaaagtgctctcaccggagaaagtcttgcagttgaaaaggaccttgagaccctgtcagcagaagttcccctgggtgatcgaaccaatatggtattttccggcagttttgtgacatacggacgaggcaaagcagttataacagacacaggaatgcagacggaagtcgggaaaattgcggggcttttgaaatcgacctccgaaaaacagactccgttgcaggtgaatctggaggaatttggcaagaagctttccattttgattctgatattctgcggaatcctgtttgcaatcagtgtatttcgcggggaaaagatcggtagcgcatttatgttcgcagttgcccttgcagttgcagctatcccggaagccttaagttctatcgtgacaattgttctttcttttggcacacagaagatggcaagagaacatgctatcattcgcaagcttcaggctgtggaaggtctgggaagcgtttccatcatctgctctgataagacaggaacacttacacagaataaaatgacagttgaagattactatgtagcaggaaaaagaatccccgtatcggaactcgatctggatgatccggcgcagagatttcttatggattacagtatcttatgcaacgattcgaccaatgaaaatggtgtggaaatcggagatccgacagagacagcattgattaatctggcaagccaacatggacttgctgccgcaagcataagaaatctctatccaagagaaggcgaacttccatttgacagtgatcgtaagatgatgtcaacgctccaccgaatcgatggtgaaaatcgaatgattgtaaaaggcgctgttgaccggcttctggaacttacagaacagatttggacacataatggcattcgcgaaataacagaggaagataagataaagatccagcagcagaatcaaagtttttccatggaagggttgcgtgttctggcatttacctatcgggaagtcccggaaaagcatacgttgtcaatggatgatgaaaatcatctgatattccttggacttattgccatgatggatccgccgagagaagaatcaaaagccgcagttgcagaatgtatcaaagcagggattcaaccggttatgatcaccggagatcataagatcacagcagccgctatcgctaaaagaattgggattttacaggacttatcggaagcctgtgagggtgctgatattgagaatatgagcgatgctgaactaagggattttgttccgaaaatttctgtatatgcaagagtttcacctgaacacaagatccgtattgtccgcgcctggcaggaaaagggcatgatcgttgcgatgaccggggacggtgtcaatgatgctccggcattgaaacaggcaaacatcggtgttgcaatgggaataaccggaacggaagtagcaaaagatgcggctgctatggtccttacagacgataattttgctacaattgtaaaagcagtagaaaatgggcgaaatctgtatcaaaacatcaaatgtgcaatccggtttcttttgtccggaaactttggagctattctggctgttttatgtgcatcgatcgccggacttcctgttccgtttgcaccggtacatttgttgttcattaatcttctgacagacagccttccggcaatcgcacttggtgtggagccacatagcagtgaagtgatgaacgagaagcctcgttctgctgctgaatccatactgacaaaagactttctcggaaaaatcggcctggaaggctttgtgatcggcacgatgacaatgctctcgtttttgacaggttatcacatgaatggtgcacttctcggcagcacatttgcttttggtacactttgtctggcacgtttatttcatggatttaactgtaaatcggatcacccggttatttttacaaaacgattctttaacaacaagtggctgcagggagcatttgtacttggtgcagtgcttattaccactgtactgacagttcccggactccaccgagtgtttaaagtggaaactctgaagctgatgcagcttggatgtgtatatctgtacgcatttgccagtcttctgattattcaattgctgaaatggattcgtatgaagttcagatagcggtaaaattctgcgattcgttaaataaacttctcggcggaaaaggtaaaaacttatggattactgctccgttttatgttgattatggtaacaatatttatttcgggaataactgcgaagtaaatatgaattgcacgtttcttgatgataatataataaacctgcattatcacacggctttttcgtgaataatgcaggtttatttttaagtgcatatctaaaacaccatctcgaatcagccgatcattccctacacataaatataatcactcatcaccggctgcaaattgttagaaagcagtgcattatagacttcttctacatttcttccatctgagatctcgaactggtcgtcgcccttatcctcgatgtcatctacatggcttccgattccggtgctgactccggcggagattttggttgccgcgatacctacaaggttgtcacgtacccgcgcgcactctctcgttgacactgtgatacttgcaaatggcatgaataaccgatatgcgcacacaacctgcaaaagctgtttctcgtgaacatccataggattgatgcgatcgttattgatgatcgggcgcagacgcggacaggaaaatgcgatttctgcatgcggatattttctctgcagaagatatgcatggtatccggtcgcaaatgcatcctttctgaaatcatccagacccagcagtgcaccaaatcctactccgcgcatgcctcctcttatggcacgctcctgggcgttgacacgatacggatagatacgtttgtggcctgccagatgaagtgtttcatatttatcggaattataggtctcctggaagacagttacataatcagcgccacatgcatgcagatacgcatactcatcagagttcaccggatagatttcaagtccgatcactttgaaatattttcttgcgatcttgcaggcatttccgatatattccactgtggatttgtttctgctttctccggtcagaatcaggatctcctgcaagcctgtctcagcgatcgcctgcatttctttttcaatctcgctttcatttaactgggcacgtttgatcttattatgacagttgaatccacagtaaatgcaataattttcacaataattcgcaatatagatcggtgtaaacatatagacactgtttccaaaatgttttcttgtctcaatctgcgctgcctgggcaatctcttcgatgaaaggcagtgctgccggtgataaaagcgccgcaaaatcttccggtgttctggaactgtgtgcgatggcctgttttacatcagccgctgtgtatttgtcataatcatacgcatgcatggcatctacgacctgatccaggatctcagacccaatatcttccatacccggcatatatttcatatgatcgattctgtttttcttctgatcttccagaatctcttcgcttaagatactttcattgatatgctgattttccatggtctagtcctccaaaaatccggtcagcggtgatgatgcacttgctcctctttcgatctgtcttcccagaccggaaaggtaggcgcttcgtcctgcttcgattgcctttttaaatgcctctgccataaccggcacgtctccggctgtcgcgattgctgtatttgccataacggcagccgctcccatttccatagcctcacatgcctgagacgggcggccgattcctgcgtcaacgatgatcggcagatccatctcatcgatgaggatctggataaactcctttgtcgccagacctttgtttgatccgatgggtgctcccagtggcatgatgcaggctgctccggcatctttcagagcccttgccgcatttaggtccggatacatataaggcataactacaaatccttcctttgcaaggatttctgttgctttgatcgtctcatagttatcgggtaataaatatttggaatcgtgtacaacttcgatctttacaaaatccccacatcccacttctcttgataatctggcgattcgcactgcctcctgggcatttctcgctccggatgtattcggaagcagggttacattctccggaatgtaatccaaaatattggcaagtcctccttcgtttgcacggcgaagtgccagtgtgatgatctgtgcgtctgctttttcaatgcaggctttcacaagatccaaagaaaattttcctgatcctaagataaatcttgatgtaaattcatgtcctccaaggctccatgtatcttttgtactcataagtttatttctccttcttcgtaactgttcattgtctacttaatatctgctgaatagttacctgtattctttatacttcgtaatggttcactgttttcacaatgtctgctgaatagctgctatatttcttcttctccaagcagcaaacgggtgatcatattggcttcatgggctgcgcagatcgcaacccgcggtgccatcaatccgttgccataggtcggttccgtaacctgatctccacacagatagaaattattcatcaaccgctttgtaagaattgcattgctgcttccatacccggccattccggatgcggacaccagttttttctccggaaaatgctccaaaattccatttacaagcatggcttttgcctccggattgtcaaatgcttcacatataattcctgcattctcaaaaagtgaaatcagattctcttctgtcactttgatgcaatccgtctgaatatcgatatacggattgatcttttgaagcagagactttaaagcatctgttttgtacataccgatatgttctgtaaaatactgctgccggttcagattcgtaatatccaccacatcaaaatcaataagatgaagatggcccacgccgatacgcgcaagtgcatatgccacgttggatcccagacctccgagacctgcgatcgtcacccggccttcggacagtttcttttgcttttccggtgaatgacgttcttcaagtgcagcctgtatttcctcttttgtcaaaaccttcgttgtctccattttcagcctcctcctacaaatgtcaccacctccatgcagtctccgtcttctaacatcctgtccgcatactcgtttttgggaaggatctcgccattcagttctactgcaatccgcttcatctggtatcctgcactttcaagatacacttctacagaagttgccttctccagttcgatttcttttccgtttactttgatcacctgcatctcacctccttgaagcaaaaaagagtccacaaagaaacgtaccctcggtggtgcgccccttcatgaactctcgctcaatctcattcttttatacctggattcgcgtaaaaaaggagataccaaagtatctcccgttaaatctgtcgtaatttttctgtaccttcacagttacagactctcttacataacgttcctacgttggcattatccaaatcaggtatacgggtcgaaattttcaacttcctctcagcctatcacataagctcccctgttctatttatttgacagttcaagtataattatttttttctgttctgtcaaatatattttttgtcttttttaattaatacatcgcttcgctttttattttaccctgtctgcgctgccacgtacaataagcttcgcaggtacgatcacttttaaccctatctccctggaggatgtgatgcgttcacgaagaaggcgaaccgcctcctcacccaataattccatatgcaggcgcactgtagtcagcggcggaaccagatagtttgccaccgctatatcattatatcccacaatactcacatcctccggaatccggagtcccttttcactgactgcccgataacagcccactgccagagagtcattatttgcaaatatcgctgtaggtttctcctcctcttccaggatctccctgcacagcacataaccgtcttccggcgtgaaacttcccacccgcacaagcgccggagagaattcaccgattcgctccatatattttttgtaagttaccattcgttcatcatgcacttcatcgccatccttgtcgacttcatagccgccaataaatgctatcttcttatgtcccagtcctgtcagataatccagcaccgcttccacagaactgtccagatcgttgactacgcaatcaaactgatctccttttggcatagcatccagaaatactgtaggctttttgaaggcttctatctgccttaccatgctcttactgaacgttccaaggcacaaaaggccatcgagtcctccaagattcttcagctcctccagattctggatctggcagcgttccatattctctgcctctaatttcttttctaccgccagacggactgtcagataataagtatccctcagctcctcctctctggaataggaataataaaccccaaccgtcaggtgacgcttcctgctttttctttcccttgcctgatactgaagttccctggcagtatcaaatattttcattctggtctcatcctgcacattcaacgtctcatcatggttcaaaactctggagaccgtcgctgcggaaaagccggtacgctctgcgatatcttttattgtagccatcttaaatccctctctgcatgatacttttcaatatttttcgaatcgcatcagctatgtcagtgcatttcatggtttatcttaccatattgcccccaaccacgcaacgaattgttacggcgctgtaactgtgaaggtactgaacagttacacgacgctgtccttatgccgttgtctcctccgtggctgaattcgccagaataaccgccgccagaataatggcacatcccaatatcatgcgcaatgtaatactttcatgaagaatcataaccgagaacaaggttccgaagacagactccatagacagaatgattgccgcctttgtctcatccacatacttctggcatgctgtctgaagaagataacagaccgttgtgctgataatgccgagatagagaacactccaccatccttttgcagtaacctgaaaatgcacctgcccggaggcaatcatgaatatcaatgataaaatacctgccgtacacatctgaataaagttcaacacagatgccctgtactttttcacaaagatgcttgtcagaaaaatctgaaaagcaaagcccactgcacatataagggtcagtccgtcacccagtcccagggacagatctttatccagggacaaaagtcccacccccacgatggccagcactgctcctattatacctctgaatcctacttttttccggcagatcagaaaagcaataaaaggaacaatcaccacatttgtggctgtgaggaacgcattctttgacggagtcgtatactgcagtcctatgatctgaagagaaaacccaataaaaagagctgcgcccataaaaactcctgcagttacttcctctttttttattcctttaagatttcggatacttatcccacccataagcacggaagccaacagaaaacgaatggtcatgatctgaaaaggcgacagactgtcaagagccatgtcactggccacaaatcctcctccccagataacagtaactaataccaatccggcaatcgccatatattttttcataaatcaccttatcctttcagaggtttcaggcaaatatcagacccgattccacataaaaattccgcaagcacgtcaatacatccctgcacatcctccatactgcacacttctgccggattatgcatatagcgaagaggtatggacataactgttgtaggtatccccctgcctgccatatgaatagcatctgcgtccgtacaggttcttccacatccgtcctcccactgatattttatatgtacattccgggcagctccgtgctttgtcagttcttcccctacagtagttgccgcataaattccacatgtgcaccctctttccttggcctttttcgcagcctccaggataatatatcctcccagacggtcatcaaggcctcttgcacaaagtctgtcatttaaaagttctctgtaatccgtgtcaaagctcaccgaatcaccacaggccacatgagccatggcatcttccctggaaacagcaccgatatcgatgatgatatctgtaatttccaactctttcttattcagagagccatggtttcggactgcgccgtaaaccacatttccttcatgcataattctgactttctgtccaagataagttcccggataaataccacccgccttggatacgtggagcattcctttctccgtaatatgcgataccatgagaccaatctcatccatatgtgccgacagcataaccttgatctctgcatccggatttacaatacttaccacatcggcaatttcatccgtgtagatctcatccgcaaatcctcttgcatactttataacttttctctgaatctcttcctcgaaaccggaaaccgatgctgtttccagtaattcatataaaaattctctgttcatatgtattcttactcccttttcccattctataccgcgttcatcgtctgctcacgctttttgttgatccgataatacaatcctacactgagcaggaatctggacacctgatccatcgcaatgataatccagattattgtcaaaggcagccttaacacataagcagccagcatgcacaaagtattgccgtatccctggaaagaggcggtaaccaccgtcgtgatcaccacaaacgggaattcgaatataatagtcttcatatacccctctgccagagaaaggatctggggatcctttgaaaaaaatccaagaaaaagcggtgccttaaagtataacaccacctgaaaaacaaacacaatgatcatttccgtaagtatggtctgctccgcaatcttcctgcaatcctgatgtctgcccgcaccgtatgcccgggcgatcaaaaccgtagccccaattgccactcccttataaaaacaccataatgtatccgtaatccggatacagatcccctgtgcggaaatgtcatttgcaagcaaccgtccaaccattgccgtgattaccaggtttgccgaaatctgaagtatgttttccagtatcatcggaataatgatttgataaatatctcgttttataactttttttccgtacacagaaacctccatcctttttaaaacgggtgtttgaatatacttcagacacccgttttattatgctttgtttataaatatgactatgcttctatttgccgaatttggctttcatttcctccttccatcttttcccttcctttcttactttcttctgtattgctcggcccgctctgccagcgattccttcccggttccgaaaatcttccaggtaaatgtaaacggttccggatacagtttatctttttccagacactcggcaccccagcttgcacttcccagaccatgctgtgcataatccacagataattggatattttccgttctttgaagttcatttgtatgtgtcgcctgtgtcaggttttcctgtgtataatgtaatgctccaaaagagaattctttatccgatgcgatacagattccgttacccgcctctgtcacaaacgcagcccagcgagtatcctcatgattacctgtctcctgaggcagtacataagggaaatagaaatcttccaccttcttctcccagcagcctatcgcgttgccttctttacagtccggatatgtttccagaggtcctcttccgtaccagactgcctgttcacaggctttatccagcacaaaccgcataccgatccgcggaaaactctccggaagctgcacaccggttggcactccgtgataactcatggttataagaccatctgcctgaatgtgatattcagccttcacaatgattttccagtcaaccgttatcggtgcatagatctgtgaaacggagataaccacttcctgttccttctcctctaccgtcaccttttcaacaaggtttgtcatggctttcaacatcgctttttcccagatttcagccacattcttgtcattgtcaacaggtgctctccagaagttcagccccagtcctttgcagattaaccgttcgccattcaatgtataaccacttaaatatccatgaacccggtcaaactcggcagtaaaattctggccttccacataaataattcctgatttttccaccatatgcagttctccggagcttccgttatctgccggctctttcactgtcttccgaattgctttattgagacattcctgatggaacgcaacctcatgatgagcttcctcagaccagatctgtttttctttgtaacatactgcgatcgtcagccagatatcctgttcatcgcaccatgctcctgactctgcagaatcatataccgtgatgcgtttgcatccatgtggtgctacctcacccagatccaccttaccttccagcagaattccctgcagtgtatgaaccttgaatgtaccttcaagatgagacaggtcagtaaaatcatatttattgcaaactgtaatttcacctgtggttttatcaaaatcgataaatgttaccggctccattactttttttacctgtaaaatacctggcgtcggtcttctgtctgcctggatcagtccatcacaacaaaatgccccactgtttggataatccccgtaatctccgccatatgtatagtaagctttgccgttgctgtcatattttttaataccgtgatcaacccactcccagataaaaccgccctgcagccttggatatcgttcaaatatttcccagtattcttttaatcctcccgggccatttcccattgcatgtgcgtactcgcatactacatgaggtttcttctttgcagtgtctcttcccaggatctccaacgccttatgtctggtatacatggtactgtacacatcagctatagaagcatccctgtcttcctcgtaatgaaccagtctggttggatcatactcttttataaatcttccgctggctacaaagctgcttccgaatcctgattcgtttcccagtgaccagaacagaatacttggatggttcttatcccttcttaccatacgttccgcacgatccacatagcttttttcccagatcgtatcatcactgatcttattcatgtttttggtataagccatctggttacactccagatcagcttcctccatcacataaagtccaagacggtcacacatatccagaaaatcaggatgtggcgggtaatgcgaggttcgtactgcattgatattgttctgtttcatcagatacagatcagccagcatatcctcttttgtaatgcatcgtcctgtattttcattccagtcatgtcggtttactccttttaatttgatagcctttccatttaccaggaataatccgtcttttacacaaatatttctgaatcctgtccactctccataggattccagaacttctccctgtttcttcagggtaaggatcacccgatataactcagggtattctgctgaccagggttttatattctccagaattacctctgtcacatattctgtctcgccttttttaccacttatctcacggctttcactgaagatgacctgttcgccgtccattacttccatctcaacagtaagcgccgtctcatcctccgtatgattttcaaacactgcatccaggcaaatctttccggtcgtctcattctgttccataaccagatcagatacgatccgccagtccagcatatgatgtttcggtctccggatcatagatacatctctgataattccggcaaaccaccacatatcctgattttccagataactgccatcactgaatttgtagacgatcaccgccagcacgttttccccatcctgtaatgcttctgtcacatcaaattcagctgtgttacgaggcccctggctgtatcctatgaatgtaccgttgagccatacgtgataagcactttcaactccgtcaaacctcaggatatattccctgtctttttgtttctcctcctgaaaagtgtaccggtaaacacccgtaggattgtctgcctgtatgcccgggtcgtccagaatcgggaacaatgctatcgcatcattataatgtggataatcataaccattcagctgccagtgtccgggaaccggcatcataccaaactcccgatcgtcatattccttctccatacatgtgtcaggaacataaaacggtgactcataataagcaaatttccactgcccgttcaacagacggtaattggaacattcttctcttcttccctgtcttgccgattccttattcggataaccacaataaaacggtctgaccggaagacgatttcttccaaggacctctacgttactccaatccatgtgtttgtatacgtattccatatctttcccctttctacttttattcagggcaactttccctgaacaacctgtctgaacaccttcttttgataccagagtgtggaatatcctacaaagatcaaaccctgataatcggatatcttcgatgcgttggcatccagcatagattcaaagacctcttttactttaaatccgtttttttcaagttccatctttatattcacgcggataatctgataaaatttatcttccacttcttcttcctcgccatacaaaagcctaactcctatggttcctcttgtaccttgaatggctgagtattcaaaacatttgttgtatcccagttcgcctgccgcctccaaaatcctttcccttgtcttctgagatacagaaaaggtagtgtcatttttcagaactctggatacagatgctgcagataccccggccctccgggcgacatctcgtatggtagccatattcccacctctcgattaattaaatcacatcgtctgactgtacatttatctccgatgtaatttagttaatatttctttttgtttagtaaatttattttcattccttataccatcacattacttgaaataataggatttgtcaacaatataattggttattcttctgtttttttgtgtataatacatatttttatcacttttatataatttatcatacctgttatttagtaaatttacataaagaaaatagactgttttattacaaaacagtccattttctttcgtctttagtaaatttatttacctggtcaatattcaacaaccccataatatctgcgatcatccggattatgatctcttactatcgaaaaataatagcagaaccattccagcggtacaaacataacgaacggtgccagatcatcatgaagtcccatagcaaagtctgcataatccagaacaattgctgtccccttccacttctcaacaaacttaagcgctctctgtgtaatcactctggaggaatctgtaggaaccaaaaacaaaaacggaacaccggattctacaatctccagaggtccatgacggaattctcccgcctgtatcaccgcaccatgagaccagagaaattccattccggtaataacaccttctttataagcaagaggcaccatggagctggcggatacggtgtagaatcctttcaggttacgaaaaacagagggagataatcatagccaggcgctgtgattatctccctctgctttccatttttctgttaataaagacccaaatttaattctttatatttttttccgtactggcagtttctttttctgtatattcctctatatctgtcgctgtcacctgtttaatatgtcgttttttcaggcgctgatacacaactttccgaaaaatagtatagaccactgacagcagcggaataaaaacaagcatacctacaatccccataagatttccgccgatcgtaaccgctgccagcacccagattgacggaagccctacagattcgccgacaacatgaggataaatcagatttccctcaatctgctgcagcaccagaaatactattatgaatataattgcctgcttcgggcttaccataaagattaaaaaacttcctacggcacacccgataaaagcaccaaaaataggaatcaatgctgtaaatgcaatcagaactccgatcaaaagcgcatacggcattctcaaaatgctcagcgtaacaacaaacatacagccgagaatcacagcttccaggcactggcctgtaagaaagtttgcgaatgtccgatacgtcagagaacagactttaagaaatgcatctgctttttgttttggaagaaaagcaaaaagtacttttctgacctgtacatgcagcttttctttctgaaaaaggacatagcaggcaaaggaaaaagcaatgaaaaaggttgccagtccgctgactacggatcccaccgctgacactgttgtattcatcatgtttcccgcaccatttccaagcagacttattccccacctgatcgcctgatccggtttaaactgcacctgatctaccagattcataatttcccggttatcgtgaaaaaaatcgcggatccagattttaatctgcggaataaaatctgtgatatttatcatcaaacttcccattgtcttcgtaagctgaggaatcacaccaatcatcaccagtgcgatcacgccaatcaccaatacgatcgtgagaagcaggctgaccggtcttgccagttttctcgctgccttattttctttttttatattttcaaaaattttcttttccaaaaaactcattggcacgttgatcacaaatacaatcgctccgccaagtataaacggaaatataatctgccctattgttttcagcacaccaagcactacatcaaacttccacagggcaacaacaagaagtgctgtaaacacaataagctcccgtatttttttaatagataaattacttaaatccaatatcttcctcctccttttgccttatatgtattccttgaatttttccggatagttacaaaaatcacagaacaaagaatagcaatttccggtaaaataaaaaaactcttattgcatatcaaatactgcaataaaagtctcaccattttcctgaagtaccggatggctccaccgtactgacgacactacaaacgcagatttccaaacataggttactccttttaattaggtttgattgtacaataatccctgtctccttgtcaatattcatttttttgaatatctaccaaaaaacgtttggtcttccaccttataacgagtataacgaatattaaataattgctatattaaattgatactgcttcctcttcactgatttcatccattttatacttccagtgataaaccacgggttcacggttcacttcgtcaaagtacttgtaaattcgttcttccaactcctgtttggtattgacacgaattcctcgaagcatctgtctggtcatcttgctgaagaagctttcaatcatgtttaaccatgagccatgttttggtgtaaacacaaatttaaaacgtccctttggcatagtatccagaaagcgccgtgtttctttggaagtatgtgcagaatgattatccaggatgatccgaatggtatcctgtgatggatattttttgtccagtatctttaaaaactcaataaaatcagaactcttatgggtctcacttactaacggaattgcttctccagtgagtaaatcaatgccagccagtaaagagagcgttcccagacgtttgtattctgcatcacgatatacttccccatgttctgatgtcgggcgtaaatccggtaccgtattggagattgcctgaatgcccggcttctcatcatacgataccgtaatcgtcagtttataatcgtctggaacaatgagatcaccattttcatcaaactgcatttcaatctgcttataaaccaacagaacctcatgcatttttgattcaaaatcaggatcccgtttttcacagtaatatttgattttaaagggtttcatatcctgttccttaagaaatttctggatatacggtttggtaacggttgaaagccttggatatcccgcttcttctgcatgtttctgaatgtatttgtggagagaggtcaacgtccacaattcctgtgcataaccgagttctgtcggtctctgacacgcaatatgaatcatccatgcttttgcatcatcagtgatttccgatggacgtccaggacgctgaacatcaaacagtgcagcatctaaaccgcctttctgaaacttcgaaatacaaaggcgtaccgttgcggtactaatggcaagtttatcagcaatttgctggaatgtcattccatcggctttatataaaaggattctggcacggtccacaacttgtgcctgaatggttctctttttggataatgctttaaggtaatctctgtcttcatctgacagaggaagatatgtttttctcatagtgttcatcctttcttagataacactattttaccatacattatcctcaaaatatatagtagaaatttaatttattctatacgagttatactatgagtatgaagagagccagttttacacaataccggtatctggcaaaattttacaccaaaaaggagtatagcacttatgaccatcaaagaacttttcgcgccgtccgatatgacggtgggaaaaccctgggagaagattgtaatttttacaatccccatgctgatcggcaatatcgctcagcagctttacaacaccgtggacagtattgtcatcggaaaatacgtgggcgacaacgccctggcggcagtaggaagcgccagcccgatcctgaacctgcttctggtactttttgtaggaatctccgtaggtgccggcgttatggtatctcagtattttggtgcaagacaacgggaagagctgtccatgacgatcggtaactgcgtcacactgaccgcaatttcttctctgatcattatgtttctgggagccgttctctcacggccgcttctggagatgctccatacgcctgattccatcattgactggtgtacctcttatctggtcattctgatggttggctgcatgggaagtgcctattataatatcttctgtggaattcttcgcggactcggcgattctatctcggcactgatctaccttctggtggcaactgtcctgaatatcattctggatatcgtcttcgtttcccgctttcagatgggtgtcgccggtgtcgcctatgcaaccgtcatcgcacaggccgtatccgctatcctctgtttctggaaactgctgcggatgacagatatctttgatttcaaattccgccatctgaagatgaaaaagaaatatacattggagatcatccggctgggactcccctccggcatcacccaggccatcttttccatggccatggttatcgtacagtctctgacgaacagtttcggcgagatggtcatcgcagccaatgtcatcatcatgcgtgtggatggttttgcgatgatgccgaacttctctttcggaactgccatgactacctacgccggacagaatgtgggcgcacatcgtatggaccgcgtggagcagggagcccgtcagggaaccgccatcgcgctgggaacctccgcggtgatcactcttctgatcctggtcttcggcaaaaacctgatggcaatctttaccgatacttcggaactggtaactctcagtgccaacatgatgaagatactcgccgttggctaccttgccatggcgatcacccagtccctctccggcgtcatgcgtggagcaggtgataccataacccccatgtggatctccatgatcaccaccgttgtgatccgtgtgcctctggcttacggtcttgctttcctcaccagaaccccggaacttccaaacggaagatatcaggtactctggatctctctgctggtatgctggtgtatgggtgcgctgctgacattcctcttctacaaaaaaggaaactggaagaaaaaagcactgacagccgatggtaattccgatcagtaaccgaatctgcagctgccatatgaaacaacaaaaacggataccgaaataattttaaccattcggtatccgtttttgttgcattgcatatcaataattgatccagtggatcaattttgattttctctttatttcacttttgaaaagacccgaaaactgttcttccaggtgatctcttctacctcttcccgggatactcccttgatctcggcaattttttccactacatacggaatattcagcgaagagtttcgctttccgcggttcggaaccggtgccagatacgggctgtctgtttctaaaagcagagattccagcggtgcgtattctacgacttccaccagttttcttgcatttttaaaagtcagtacaccgccgatgccaagggaaagccccatatccagatactcccgtgccatctctttcccgtaggaaaagcagtgtaccgcaccgccgatatccccggcgtgaagccgtttcatcgtatccagcgtatcttttgcagcgtcacggctgtgaatgataaacgggagtttttcttctctcgccacttccagctgccgctcaaaccagtagatctgtttctcgtggttctctttgtcccagtaatagtccagaccgatctcacctactgccaccgtcttttccatctggcagatctgatgcatccgtcgaattttctcttcgtccagtgctcccacatcatccggatgtacacccaccgcaccatagatatatggatatcgttccatcagatccagagtacggttccagccttctacttccgcgcatacattgatcactctgccgatgccctgcgcaggcagggcatccaacagttcttttcggtcttcatcaaaagcctcatcatcataatgtgcatgactttcaaatatcatgtcggttcactctttctagcagatctctgcgcctgcaggcatcttcttttccggaaccatcaaagagaggttgccgtccgcatcttccgcacataacagcataccttcagaaagtacacctgccagttttgcaggtttcaggttcaccagaaccatgactttctttcctaccatctcttctgcggtatagtgtcctttgataccggatacgatctgttttacctggctgccgatcttcacctgagagcacagcagttttcttgattttttcacttcttcgcaggcgatgatctcaccaacctggaactgcatttttccgaaatcatcgaaggtgatctcttcttttgcatcgatatcaaccaccggctcttccggtacttccggttttgcctgtgcagctttcatagcttctactttttccagaatttctttcagatccagacgctggaacaggatctccggtttgtctgttactttatttcctgacggatacagaccgaactgatccagttcttcgtaagatctcttttctccgtttaactgagccaggatcttttctgtggtttccggcatgaaggattccagcagagaagcaccgatggtgatactttctaccaggttgtacagaacttctgccagacggtctttcttcgcttcgtcttttgccagtgcccacggcatggtctcgtcaatgtatttgttgcagcgtttgaacaggttgaagatctctgtgatagaatctgccacacgcaggtcttccatcttggcagctacttttgccttggttcctgttacaactgctttcagatcagcgtctacgtcttcttccacacctgtttttgttaccacaccgccaaaatatttgttggacatggagatggtacggtttaccaggttacccagggtgtttgccagatcagagttcagtctctctaccatcagctcccaggtgatcacaccgtcgttttcaaacggcatctcatgcagaacgaaataacggacagcatctacaccgaagaagtctaccagatcatctgcatagatcacatttcctttggatttactcatcttgccatcgccctgtaacagccacggatgaccaaatacctgttttggcaaaggcagatccagagccatcaggaagatcggccagtaaatcgtatggaaacggatgatatctttaccgatcagatgcaggtctgccggccagtttttgttaaacagttcggaactgttgccgtcgcagtcatagccgataccggtgatgtagttggtcagcgcatccagccatacgtaagttacatgtttcggatcaaagtctaccggtataccccagctgaaggaagtacgggatacacacagatcctgcagtcccggaagcaggaagttgttcatcatctcgttctttctggataccggctgaatgaacttcggatgttcgttaatatatttgatcaggcgaggagcgtatttactcattttaaagaaatatgcttcttcttttgccggtgtacacggacgtccgcagtccggacattttccgtctaccagctgagactctgtgaagaaggattcgcacggggtacagtacattccttcgtaatgtcctttgtagatatctccctgatcgtacagctttttgaaaatcttctgtacctgtttttcatgataatcatctgtggtacggatgaacttgtcataagaagtgttcatcagatcccagattctcttgatctctgtagatacgttatctacatattccttcggtgtgatacctgcttcttcggctttcagctcgatcttctgaccgtgctcatccgtaccggtctggaagaatacatcgtatccctgctgtcttttgaagcgggcgatactgtctgccagtacaatctcgtaggtattaccgatgtggggtttgccggatgtgtaggcaatcgccgttgtcatataaaatttttcttttgccatgtttggttcctccttgctcacgcatactatgagaaacacgctccgcgagtttctcaagttaccgcggcagtcgccaaggtctcgtgcaagcacggactttggctcgttgctcgcgtaaaaaaaccgccttcttactgtttgtaagaagacggatatgataccgtgttaccacttctcttcgtctctttctcacgaaagaaacctcgccaagtactgctatactctgccgctataacaggcggatcctgtcgcagcctaaccttccggctcggtgcgcctctcagaagccatcttccattcaccttgtcacttccctctcagcctccgggaattctctgtaatgacagtcgtgcatgtactctcttcgtcacggtgtttttgtttatgactatagtttatcgtagcatatacgtttgtatttgtaaagtctgtaaattttacttcttcagatattttttcacttcttctgctgagcggttcagcaccagttcttccggaaagtccagtttcgtcagcagttcccttgccatatcgaattccccgatcagtgtatcaaagtgggcatcgctgtccatcacgaccggtacctgatattttttgcagtagtttaacatgatcgtatcgttctccaccgcatggatacggctgcagccgggatccatggaatggttattcagttccaggatctttccgtattcttttgctccctgtaccagtgcctcgtagtccacttcatatcttccgtcatccggatgaccgatgatattgacgcatggattcttcatggcgttcagatacgcttccgtgttctcctgacaacttcccggttccatgcacggggtatgcaggctggcgatgatgatatccagcttttccatagtcttctgcggaagatctacggttcctttcgcatctagaatattgacctcagaccccagcaccagctcgatgccgtacagttctctcggcacgatccgcagattgtcaaaataaaacagatgacaggttcccggcatcttcggtgcatgttccgtgattcccaacagctccagccctttatcggaggctgcttttgccatctctcttaacgtggagtacgcgtgtccgctgacgatggtatgagtgtgtaagtccaggaccgaattgtatttcataatgataattcctcttttctctgtttgttgccacatgattataatgatgttaagatatcggattgtttcgtacttcgtactctcacaatcctcaaaaacattcgcaatccgctcatttttcttcgaaaaatggctacttactcatgtttttgacgggccccaagttcagaaatcttcctgcaagcaagcttgcgtcagatttcagaccttttgaccctgatatcttatcatgttccggtcttttctacaacctgtcatacacacacgttgtccacatttaccaacatttatacctgattttttccacattttacagaactttattcacaccggaagcatattctgcgacttcttcatctgtctctttctctgctttttttcatttccccgtcagaaaacacatcactccccacaaaaagacccccagcaggctgatccattttcccgcagaaagtcccggggcgtggtagatgatcgtcacccagtgttccccacttaccagccggcagcccagaaacgccgtgttaactttctctgtcacgacctctctcccgtccactttgatctccagatgactgtcgtacgggatcgatgtgatcagatagccgtcctgctccatctcgatactgccactgatctggtttccctttgttgcgttccggtccggtgtgaatgtggactgatacagagaagcatcttccagtaccgtcgtatcactgacatagcttttcaggttacagatccgataagttcccgcaccgaatgtcacttttatcttttcctgatctgcagaaagtttcatcacataagtaaatgtcgtgttgtcattataatacagatgacttttggccgtcagcttatttctgatcccgttgatcacgatgctcacatcccggttcggatgtccattttccacatcaaattgcagatacaggattctctcttttcccgatgcatcttcgtcaagagaaagtgtggctttctgctctttttttgtcttaatcttccaggaatcgtcttcctttgtcgctccccgcttcgccgtaaacgttacgtttgtttcctgtatacccttcgtcatttcaacccctgcatcggcgatcttttcatttcctgttaccgcatactgcatcagcatggtctgattatacgggaatttcatggcctgatacgttttttccgcgatcacccgattcgttccgtagatcaccggtgcagccgcctcctgtacctccgtcgtgaagctctccccgtcttcactccgtccgatcacatatttgactcccataaacttctgaaacagcggattggccgaggcggactgcatcagtccgtttcgaaacggctgttccacctgaaagacatcgttccgaaacttttgatacgctgtgatataggcggaagagtataccgaagtcgtccactggcgcatatcccagatccggtttacgttgtcttttcgcttctttgcaactccgctttgctccgtccggtacaggccggtttctccgtccagcgcatcacgcacggtatcctgccaggcactgtctgtgatctcctgataatcttctttctgcaccagattgcctgcctttccgttcaccacatgattgatcagcaccaggcataccagcgccggaaccagaagcaggaacgggcgtttccacttccgaaagatcagaaagaagaaaaacagtgctgcgctttcgaacaggatcagctgataattctgcgccctcgatccgtccccctgcagataaagtgccagcagactgacacccaccgtaccgccaaatatgaatgttcctttccatctgcctatttccccgtttttcatacggttcaaaaacactgccgtaagataacagaaaaatgggagaaacgggatcagtgatttgtaccgcacatacagcatcccgttaaatccccaggcaaatacaggaaccgtcagaagtgccacgcagaccaccgataccacccgctcccggatcgatccacacacaatcccgccaagcaaaaccgccaccagaataaccgtcagccccacgctgtaagtgccgtacagtgaactgtccagctgcagattcggcatcagcagttctttcagattctgactttgggaacttccgcttcgctgcaggatcgcatatgccgtaggaaccagcagtacaccggctgaaagtaccgccacgatcatcggaaccgggaatccgaacagttttctctttcggatccctttgggataaccgtaccaaccatataaaaatatcgctgccattcccgcgatgctgaaataaaaactggtcagaatcatcagaaacacacccagggtatacagacctggttttcctttttcccagtaccgatccacacccagaaacgccatcagtaagaatggcatatactgcacaaacataatctgatgacaggactggtagatcatcggtcccgccagtaaaaacaggactgccacgccctgcgcaatctctgtggaaaatccccgttttttcagccacccgtacagcaggcagaccgaaaccgccagacagatcacactggcagccatcagataatcgctcattttcacaaacggaagcagataggcgatcagcacgatcggattatacagcccgtaataggaaaaattgtaaatattctgcccgccgccgatgttcgccgcgtattccgggaaaaactgtcccgtctgataaaactgctgccggaaatactccgggaacacgctgtgctgactgatccagtccatatttgccccgaagacaccgtatcttccggcaaaaaaccagcacgctgccacagtcagaacagtcagtacagcgtaagacgccagtccgcaaattttctcttttgcattactctttttcataactggaactccttatgatatagatcggacgatgtttggattccagataggttttcgagagatactctcccatgatccccatgcagagcagctggatgcctcccataaacaggatcacgcagaccatcgaaggccagcccgccaccggatcgccccagatcagtgtccggatcaccagaaacaagatcattaaaaacgataccccgcagaatacaacgccaagcactgccgccaccgataagggagccacagaaaaaccggtaattccttccagagaatacttaaacagctggcgcagagaccatttcgtctctcccgcgctgcgctccacattttcatattccagccattcggttttgaagccaacccagctgaagattcctttcgaaaaccggttatactcactcatctgcaacacggcatctaccatcttccggcacatgatccggtaatctctggcaccgtataccagctgcgtttttgagattttgttaataaatttatagaagttttccgataaaaacgagcggatcaccggctccccggttcggtcggagcgtctggtggcgacgctgtcacagattccgcttttgaccatctcatacatcttcggcaacagttccggcggatcctgcagatccacatccatcaccaccacataatctccttttgccttacagagtcccgcgtaaatcgcagcttcttttccgaaatttctcgaaaaagaaagatactggcagcgcacatccttctctgacaatttcttcatctccgaaagtgtcgcatcctgtgatccgtcatccacaaagatcagttcacagtccgcatctatcgcatccatcaccggacacatatgttcataatagatcggtatggtctcttcttcgttccaacagggaacaatcactgatatcaggttcatactctcactcctctttccgtttcagaacgtatacttatccattttattccttcgattcagcattgtaccccctgtttcttaaaattaacgaaagataaatcctaagatttctaaagatttttttacaatctgtaaaattcctgtataatgaggagcagaaagttaccgggcaacatccggtaccatgcaattgcaaatgcagagtcaggactatctattcatgccaaaacacctcgcaggatagtggctactgaatagttaccagaagttttacgaaaaagcggaggaaaacacatggagcagcaaaccacaaaggttcttgtcgtagacgataacccggaaattcgtgatatcatacatgttttactggaaggggaaggtatccgggtgacagaggctgccgatggcagttcagcccttcattttctggaaaaaggcagttttgatctgatcattctcgatatcatgatgccggggttaaacgggtacgaaacctgccagaagatccggcagctgaccaacgtaccgatcctgtttttaagcgccaggacttccgacagcgataaacttatgggcttttccagtggcggggacgattaccttgcaaaacccttttcctatacggaacttctcggacgcaccagagcgctgattcgccgttaccgcatttatcagggaaaatccccgactgccagacagtcagcatccaatctgttgacctgcggcgatctgtgcctggatccccggtcggaaaaagtaactctgaagggtcagccggtaactctcacctccaccgagtaccagatcctgaagctactgctttccaaccgcagacagattttctctccccagcggctctatgaagcaatctgggaggaaccttactattacggcgccggcaacacgattaccgtccatatccggaatctgcgtcagaagatcgaaccagatccatcgaatccggtttacataaaaaccacatggggaagggggtatcactgtgattaagatccgacatatccgaaccaaactgctgttgctcctttttgcctccgcactgctctgcctcggtctttttcataccctgtgggcaaacaaatggtacgtccttcacctggtcacagaaacaaatcttcccatatccctccccattccgcaactggatgaaaatttctggaccatgctcggaacagaagctttaaactacgatattcctgattccgaagcagataccgaagccgtaaaaaaactacagccattgtttgatcagctggatgattacaccggtctcgctatctacggtatggaagacggtatctaccgcgccgcccattatccacgctgtatggataaagaacagtttcagtccttctttgatatcggatatcgtctgacggacggggtgatggagcaacaatgtgaacggaatacaaagtttaaaaatggctacgcaaccgtgattgtcgacttttatcacagttccgtatttatctttccttacttcctgttctctttgtttgtgtcggtgggtctgttccttctgatcctgctgttttttatcaaccggaaaatgaagcaggttgtgcttttaaagcaggagattcttcgcatgtccgccggtgatctctccactccgcttgtatcttccggtgtcgacgagatcggtgttctctcccgggaacttgaccatctccgtctcaccctcgatcagaatatccgtcaggaacaggaagcacaccagtccaaccgggaactgattgccgccctctcccacgatcttcgcaccccgctgactgttctccacgggtatctggacatcctgcacttaaaccggaatcccgagatgcagaatatctatgtcacccgctgcctgcaaaaaaccgatgatatccgcaggctcaccgaccggatgtttgaatatgcgctggtgtacgacgcgtccgaaccggaacagatccggatgatttctttttcactttcccggcttctcgaactttttcgggaacagatggattttctggaacttgccgggtttcacacggatatatcttttccggatgctgacacttccgacattaccaccccggacgcacttacgattcaggcagacccggagctttgcaagcggatcctgaataatctgttttccaatattctgaaatatggcagcaaacaggaaacagtcacgctttccatgcagcttccgccggaaatcaacaaagatgctgcgctgtgtcttgccttaaaaaatactgtgaaaccggaacattccgcagtagaaagcaaccgcatcggtctcaagagcagtacgcggaatatggagcggatgggtggaaagcttgtagttttccagacagatacgttcttcgaggtaacgctatctttcccggttaccgctccgtaatctctggtatcagacacctttcattcttgataaattttcaccaaaaaaggcacgaaaccgtcagatttttctgatcccgacagcttcgcgcctttcttttttctgtttttattttcagtctttattaaatacttctctgttcaggctgccttcctgatggcatacgatcgttgtacatacagcatcaccggtgatgttgactgcggtacggatcatatccaggatacggtctatacccatgatcagggcgataccttcggtcggaagtcctacggaattcagtaccatcgccagagttaccagaccaacgcttggtacaccggccgtaccgatagatgccagagtggcagttacgactacggttgccaggttacccatagtgaggggaatgccgtaggcctgagcgataaatactactgccacgccctgcatgatggatgttccgtccatgttaatggtggcacccagagggatagtaaacgaagatatctgcttagatacacccattttcttactcagtgtgtcgatggacatagggatcgtcgcattggatgttgctgtggagaatgcaaatcccataaccggcaggaatttcttgataaacttgaatggattcagtctggtgaaaacaaacaaaaggatctgatatactaccagacactggatcgccagagccagtgttacattgcccatatattttaacatcggagcaaatgcggagaatccaaccgttgcaaaggtacgtgcgatcaggcagaacacaccgatcggcgcgatcttcatgatcgccatggtcatctccatcatgacatcgttaaactggctgaagaaatttgccacaaccgaacctctggttcccagttttgccagcatgatacccacaaacagggcaaatacgatgatcggcagcatatcgccgttcgccatggactgtaccgggtttttcggaatgatatttaacagagtatccaccaggctggtggcttctgtagaggaagataccgttcctttctgaacagcatccatatcaagacccaggcccggattaatcagcagtgcacttcccagagccacgcatacagcaagagctgtggttaccagatagaatccgatggtttttacaccaacttttcccagagtcttggtatctccgatcgccatacttccgcagatcagagaacagaataccagaggtacaaccagcatctgcatcaaacggatgaatccctgtccaaccacataaagaaccccttctacgatgacggtatctttgatataactggaaggaatccagtaatggatcacaactccaaacagagctccgatcagcagtgcgatgaagatctgcgtagacagaccaattttcttctttgttttttctgcagtattttttgccattattccaaccctcctgtctcatccagatattccttcagggctgccttccagtctttcggctcttcgatgccggtcagacgaagcatcatgttgtccagaacggagtatgtcgggcgcgcagaatcctcgatcacaaccggatacagatccagttctccggcttttccggaatactcaagaatcgttcttgcgaattcatatctgctgcagcttcccgggcagaccacatggtacagaccatattcttcattatcaataaaataacggatcaccttcgccagttctttcgcgctggtcggcgccgcatactggttgttcggcacttccatcgtctttccctgtcccacattgcgaagcacttcatccacaaaatctcttccgattccatagatccaggagcttcggataatcacaaaccgatttaacagctgggttaaaatcttttctcccgcttcttttgattttccatagatcgttctcggatgcacattgtcaaattcattatacggaacccgcgattccttatcaaagacatcatcagtagaaatctgtatcactttcgcattcacctcattggcagccagtgccacatttctcacaccgatcgcattgacacgatacgcttcatctacattgttttcacattcctgtacatcggtcaggcctgcgcagttgatcacaacatccggacggttgacatgtacaaactgtgtaacctcatcaatctttgtgatatccacttcctcgatatccgtcggcagcaactggtattccacgccttcaagcagatcgagcagtgcggttccgatatgtccctccgcaccggtaatccatattttcttcatcttgttcctcccattacttttccggggtttccctgagagatctgaacatctgtaactgcacgcacatgattgttgcagatattcagactggttgacagtttcctgtttcttacgcttcttcattgtggttttcttacaatctcatcacgtgatcattcttgccacaaaatcgcctttgcataccatcccctccgcagaagctgtcactgtcagctcccttcgtatacaatatcactaaaaaggtccaccggaccttttgtcgtatgcttggcaacgaaaatagcgacttgcctcccggcaagccgctaaacatactttattttacctgtattctgtcggaaagtcaatattttacattttagtttctgtttactcttagatttccttccagataatctcatttgcttccatatgcagatcaaagcttgttccgtcacccttataaacagtggtatcctgcggttcgtaggtattgtttacgatacagtatttaccattctttacataggcatgtacttctacgttgtagttgctgctgaaccagcgatgcaggttttcttcatcgtgtgcagcccacaggatcgcacggtacagcacacggctgttctcaaagctgtatggcagaccgctgatatagacgcctcttccttctccaaaagagttgactgccatctgcacttctttatcgatctggcggatgatcgtggtatccggcagagcatacatgtttttctttccttctccgaagtccacatctcccttgcagtcctcggtgataaagtgggtatgctcttcccagttgtatttgtctttgttcaggtcaaatccattttcgcgttccactccaagaacacttcttaactgaatgtatttgccttcccactgatgaccggtcggctcaccgattccgataaatccgccgccgttgtatacaaattcattgatcgcagaaacaatcgtatcatccgtccagttgtccccaccggtatatgcggtatcaccgtcgcccacattcaggatgacgtcgatatctttgagcatatccgggttcttgcggatatcatcaaaagtgataaaccgtacatcaaacggtgcaccgctcaacgcttccatgatgcccgcataagaatagttctgtttatggtaaatcgcatgatgtaccatatgattaccccacgcacgcatcttaccccagcagtttaatacggctacggtttttacacagtacggtgtggttcctttgatattttcatacagggtacggaattccttgcagacactttccacataatcgataaattccgggaactgtaccgccagtttcaggtatccgccgtaaccgatacggtcgatcggttttcttaagatcgcacgacgcgcggttacccagttgacttttgcttcttttaccggatctccaccctcatggaaggtatccgggaagaaatacggaaggaaacgtccctcggtatatttgacaccaggaatatcactgatcagacgaagcgttgctccatttcccacagaacctaccacggcgtccagtcctacggacttgaactcatccataaacggctccataccgatccagtgatcaccaaggaacatcatagcttcttttccatactcatgcacgatatccacaaactcttttgcaagcttcgtaacttctcttctctggaatgcggtaaagtccatgaattccttggacggaatccggtacatgttgttcatgtaaccctggtcaatgataaattccggacggaacttataacctacttcctgttcaaactgttccagaatatacggacttaccgatgcagaataaccataccagtctacatatttctctctcgccagctcatcaaagatcagtgtaaactgatggaaaaatgtagtaaaacgaaccacgtccacatacggatgactctccaggaattttctcagacgtttcttggagtattcttttgtcttcggctgacggacatcaaacgtgatctgtttttccacaccctgccagtcattagtcaccgcattatacatatgaaccggatcccacataatataagccagaaaacttaccgtataatcatgaaaagccttcgccggtttgatggtcacatcaccggtctcctcactgtaactccactctgtcaccggaaccacttttcctgtcgtacggtcaataacttcccaccatctctggatatcatcatgcgaatttacctttaacatatccggatacagatgatccatcagatgaatcgacagctcaccctttgtcgctgtatggaacgatgtcataatatacatctgctgaatctcatccggattcgctttcgcccatacattatcttttctggttgtataatatgttgcgtataccttcgcatccaccttcttcagttcttccgggtaatccgttccgtcacagtcacggatcgcatccgccccccaccgtttcaccagctccagtgtctccggtacgacatccacatcagtcggaatcgttactctgcccgttgtacactctttacccataacacacacctctccctttctttattatcactctcggaaccttaccaattccgctgatatccaatcccaaattataaatcaccagaaataactgccgacaatgaccttttcccctatctgtctctcactgccggcagtcctattccagtctgcatcagacaggcggctgtttcccgtccgctgcactaaattcattatatccaatccccaccattctttctatgctacttttgttccaaacattagatatcttgcggtataagcgattctttgctatactgacgtatataaaccagtaaaatatttcatctacggtttttctagtggcatcctccgatattttcctgcgcaaacttctcgcagcatcatactgttccgggtttgccaccgtcagaaattgcggtcatgcttctggagccacacaaccgctggtaacgcaaatctgaactagtcactaactccgactatgtttgcgagggtcggctgaccctcgcaaaagtctgcgtaagtgccggatttcatctttgctaagggcaccagcaaaaggctgtgtggctccagaagcatgaccgcaatttcgtccgcccgccaacccactaatttccaaaggaggtccccacatgtccaccctatcctattccttaacagacttatcccccgaacaccagccgccccaccaacacctccgctacgtaacttcctcctccttcggctccgactggaacggtgtcctccactcccacgactgcaccgaactcttctacgtaaccgacggcgaaggatggctgtgcaccgatgaaacccagatccccctgcgaaaaaacaacctcgtcatcgtcaatcccaaagtccaccacaccgagcgctcctcaccggaaaagaaaatgcactatattgtgctgggaatcgataacctacagtttctcttccacgaaggagaaaccttctcccccttccagatcttccagctctcctcccaccgggaaatgatcctctcactcctgcacacgatcctggaagaactacaaaaaaaacagacttcctatgaggaagtctgccagcattatctgtccattctgcttctgcagctccaccggatcactggaaaagaattctcctttgcgccgccaaccgatatcccctatgaatgtcagcgcgccaaagcctacatcgaagaacacttccacgaaccggtaacactcgagcggatcgcagccatcgtccactgggataaattctatctctctcatcagttttctgctgccttctccgtctcaccgatcaactacctgctgcaactgcggatcacccacagcaaacgattgttgtgtgacaccgactactccatcacacagatcgccgagtccagcggattttcttcgcagaactattttacacaggcattcaaaaaactggtaggtgtctctccaagagcctatcgtcagaagcaccagaaataaatagtcaaaatcgatccacagatcaatttttgttatctattgcagtaaaaaatcagatgccgttacagcatttctgtagcctgcatctgattttctgtttttctatcactttcccgcctgagcaactatacacacagccactccatcaccacagcagcttctgaatttcttagattcttgcaactcccgtatctcttgcagccttcgcaactgcctcggcaactgcctttgccacccgtttgtcaaatggattgggaatgatatactctgcatttctctcctcatccgtgataatatttgcgatcgcatacgcagcggctaccttcatctcatcgttgatatcgctcgctctcacatccagcgcgccacggaagatacccgggaatgccagtacattattgatctggttcgggaagtcactccttccggttccgatcacagctgcacctgcagcccttgcctcttccggcataatctccggtgtcgggtttgccatcgggaaaagaatcggattcggagccattgtgcgaaccatttcctgtgtcaccgttcccggtgcggatacaccgataaatacgtctgcccccttgatcacatcttccagacttcctttttccatgttccggttggagatctcagccatctcttctttttctttgttcagtccttcacggcctttgtagatcgcacccttccggtcacacatgatcacatttttcaggcccatactgatcagcagtttgatgatcgcgataccggctgcacctgctccggaagttactactttgatctcatcgatcttctttccgactactttcagcgcattgagcatagctgccattgttactactgcggttccatgctggtcatcgtggaaaatcggaatatcacaacactcttttaacttgcgctcgatctcaaaacaacgcggtgcagagatatcttccagattgactccaccgaaacttcctgccagcaggctgacggtctttacgatctcgtccacatctttggtgcgcacacacaacggaaatgcatccacgtcgccaaatgccttgaacagacagcattttccttccataaccggcatacctgcctccggtccgatatcgcccagtcccagtacggcacttccgtctgtaacgaccgctaccatgttgtgacgacgggtatatttataagaaagatccacatcctctgatattttgatgcagggttccgcaacacccggtgtatagcaaacagccagatcttccggagtatccagttttgcacgactaatcacttcgatttttccagcccatttttcgtgttcctgtaaagcgaattctttgttatccatgtttctcctcctgcatatattattatttcattttttccattagtattttactttgtttcaaaaaaacatgcaatcaaaaacaacagaatgagaaaaaatgtcagaaaagaatccgtcatatcgcattttcttccgctctacagataactctctttcttattcaactcttttctcagataatctcctatcccggtaatggccaataaggttacaacaagaaacgccccgggaatcagaatgatccaccagccatcggtaagcagcgctttttctgacagtgacagcatgcttccccaggagatgatctccagtggcaacccgatccccataaagctcagcgtagattcttccacaatcgcacttcgaatattcataactaccatgaacataatagaagataaaaagttgggggcaagatgtttccggagaatatagaaaaagccgccacccatacatctggctgcaactacatattcattgcttcttagctgacgtacttctgttcttactactttcgctatactggtccagcttgtaactcctatgaccaacgacagactcagcacatttgccttccccagaatcgcctgcagaaaaataaccaaaagcagattgggaatgctcagcaaaatctctgtcattctcataagtaacatatccagccattccggtgccagaccactgacagttccaaagataatcgcaatactggttgatatcattgttgccacaaatcctataaacaacgactgtcgtccaccgtaccatatcatggagaaaatatctctccccatggtatctgttccaaacagaaactccctgcatggtgcaacggtataatttttcagatccatataggacggatcttttgacatgatccatttacagaacagacatccaccagcaattatcagaagaacaatgacagacagccagggaactccctgataccatctgttttctttttccggtgcctgacgttccagaagttccggtcttacaccgacaatttcaaacggatcattcatgttccctcacctcctgtatatccggctgtctgctgatgcggatgcgcggatcgattcgctcattgagaatctgtgctgccatattacagacaatcactatgatcccggacagcagactgaccaccatcagcagattatagtccttatagcgagcactttcatatgccagcgtgccgattcccggataggaaaaaacagtctctaccacatacgttccacccatgatatgtgctacggaaattgccataatgctcagatacgacggcataatatttctcagacaatgtgtgatcatgatccgtgattttttcattccctttgccttcgccagcagcacgtaatccgcacggacttcatccagcattttgtttcggaccatatagccataataccagagatgttctgtcacgataaccgctaatggaagaatcatatgcacgatacgatcggaaagattgttttcctgccccaccgcatatgctcctgagcttggcagccatcgaagagaaacagaaaacacaagaatcagtaccagcgccagccagaactccggtacacagctgattacggttcccactttacagatcatacggtctgtccatccgccttctttccatgcacatacaatgcccagaagcaacgacccgaaaaatatgatcaaaaagccaatgccaccgaggaccagtgtattgccgattctgcttttgagtacctccagaacatccattttatatttatatgaaattccaaaattcccatgaaatgcctgtcggatccatctggcatactgtacagatattttatcattcagaccaagtttctcttccgcccattccctttcttccgggctcatcttttccacgcgttctccataataagaaaccagtggatccccaggtgcaagtctggatacataaaatgttacaagagacagtacccatacgctgattatgaaaataagcacctttttcccataatataatacccgttcacccctcattgtacttcatcacccttctgtttcgttcttccctcggatccggtacgggaattgctgccagcaatgcttttgtatattcatgttccggatgtgaaaacacatcctttgtggttccttcttcaaccagtcttccacgatacataactccggtccgatcgcacaaaaatttcaccatcgaaagatcatgtgcgataaaaagaaaggaaaatccctgctctttctgcaattttcgaaacagattgaccatctgtgcctgaatagatacatccagcgatgcgattggctcatctgccacaatcagatccggttttgctaacagtgcccgcgcaattgccacccgctgtcgctgcccgccggacagttcatacggatatttttccagataacttccatcaagtcctaccatctccagctgtttttcaatttcctttttatctgtacggatctttcgggactgaatacgcagcggttccaccacgatatctctgactttcattcccgggttcaggctggaagccgagtcctggaaaatcatctgccgcgtcatctgtaacaccttccggttctttttaaattctctgtttttgcagaccggaattcctttataatagatttctcctgcggaaggtttgtatatattcatgacacagcgcgccactgtcgatttcccggatccggattctcctaccaggccgtaaatttctcctttttttatttgaaaagaaacatcatccactgcatgcacttccaccttccgattcagccgaaatatgtgtgaaagatgttgcacatccattaaaatatcatttcccatatcttcgccctcctatcggaaccttcaccttcggtgcccgctcatccagcagccaagtagccgcataatgggtatctgtaatccgaaacataggaggctctttttcatagtctattctcattgcatatacgtttctctccgcaaatgcatcaccctttggcggatgaatcagggtaggcggcatgcccggcagtgtcgggagccattcttttccttctgacagaacaggaagtgactgtaacagtccccaggtatatggatgccttggatcataaaaaatctcctccgccgttccgatttccacaatttttcccgcatacataaccgccacacggtctgccactccggctacaacccctagatcatggctgataaacacagttgccatctccagttttttctggatccgccggaacacatccagaatctgtgcctgaatcgtcacatccagcgcagtcgtaggctcatcggcaaacagaatcttcggattaccggcaagtgcaattgccataactgctctctgacgcatacccccggaaaattcatgaggatactgacggatcctttcttccggtctgtctatttccaccaactgcatcagttctataactctttttctgatctgtcctctcgacatttttttattatggatcctcaccgcctccccgatctgttttccaaccgtaatcgtcggattcagagatgtcatcggatcctgaaagaccatcgaaaaaagttctccacgcagccgtgacatattcttttccgtatagtccgtaatatccgctccattcaccagtattttcccggacttgatttttgctgtcttcggaagtaatttcataatacttttgcacaatgcactcttcccgcacccggattctcccacaatagccagtacttcccctttttccacagtaaaacttacatcccgaaccgcttccacttcaccggcatccgtaaaaaagcttactgacagatgttctgccttcagtaactcattcatgactaacctctcaaaactgcataaagagactgttgccagtctctttgcagctctcatctttctttttatttcacgatttcccagtcctgaatattccagaaaatgccaacgccgtgatggccaagtacggtcttttcagaaattcctttgatatccgaagccgccacataattggcatcaatataacagataaatgcatatgccggatcctttgccagttcttcctggaaaagatcataatacttcgcacgggtttcctgatcttcatactgtcttgccagggtcagatattcatccactttttcattggaataaccggaataattggctcctttatccgttccgaaaactttataggtatgatcatctgcatcaaacggacttccccagccgatcaggcaggccatctgtcctccccagtccatctgtgccgggatatctaccgtacagttgatgccgatctcctgcaactgctgtgccgctgcctgcgcaatgtcgattcgatcctgttcaccggacataacgctgatcacaaagccgatttcttctccgtttctctcgtagaagccatcagcgtccatggtacatcccgcattctcaagaatctcttttgccttttccggattataatcataatgttccacatcttcgtcattgtaaatatttctctgcaacggaccataggccggcattccctgacccagaagcactgcatcaataattgcctgccggtcaataccataacatactgccggtataatatctttgttttccgtccagtaatcgttgccgaaattaaacataataccacgataatccgaagttgtcatatcatagcaggtataatcttctgtatccttaaaactctgtgcatttttcggatctaacagagccatatcaatctcaccggactgtaactgtactgcctgtgtattgtcatcctctacaatcttaaagatcactttatcgattttcggactgcccagataataatcttcatttttcaccatgacaattgactgccctgcatcccagctttccagtttatacggacctgttcctatcggatgacggaagaaatcagattcctgcatatcttctccatccagaagatgttttggtaaaatcgccattgtcatatattccagaaatgccacatttggttctgccagtttaaaagcaatcgtctggtcatctattactgtaatttcctcgatatcttcataattcggcgcattttccgatccgttatccggatccatgatagcttctatggtaaactttacatcgtctgccgtaaacggctctccgtcatgccatttgattccatcacggatatgaaatgtataagtacaggtgtcttcatcatagtcccagctttccgcaagacccggcactacctgatcatccgcatcatgagcagtcaatccgttaaataacagcacattgatctcacagtgctcatccatcgccggattgatccgcgtataatctccggatccgtatgtcagtgtagattcttctgtattttctgcttcttctgcaggttcatcacctgctgtttcctcattccccgtcttcgcttccccagtgttacctgtttctgatgcacccccacaggccgccagcgatatcaccagacctgctgcgagcaataccgcaaccattttcttcttcatatgtttcccctttctgatttctgtaaaaagaaaggaaaggaatctttcccgatttctttcctcacttctgacattatttgctttcccttccatactgcttatagatgcggaggaagcagtacggtctgagcgaacttacaacctttctctgttgtgtgcctatcataacctgtctttcttccccccgcaagccccctgcggggttatattttcatctttttttcacccgttatttccgtgattttcccatcttttttctgttttacatcctcatccgggggatagttaaaatcttttagttactgttcacttcgtgcccagtaacacgctgcgcgggatattaccagtgaacagtaacgtcttttacagttacaaatgcatgaaatctttctttcaatagaaaaaagcgaaaaaatatgatatgctctacttatcaattaacgtgagagggggattcaaatgaataacaaaggagtcggttccattttttgcctgatatcggcaaacttaatttccgcaaaatacatagcagccgcctgcttcatgagcaacataacaacccaagatgcatcctggttcgcagaaggactatcgtatgtaggacctttcctgtcaatcctttctgtctttgctctgatcatcggacttttcttcctgggatacagtatctatcaggacataaagaaaaacaaaaaatgaacgaattctcaacggaggaaatcaatcaactacacgattcatttcctccgtttcattactcacatctttctgtcattttaccaacacccagaaacgaattccggagacacgggggaggcggccttttgctggtgcttttagctcagctgtgcgttaccagcggctgcctcccccgtgtctccgaaatccgtttcgtccccttagccaaagcttaaaaaagagccatctcacatagttccctatgaaagacagctcccttttccttaacgttctataattttcaaatcccacgcgccaatttccagaagatcaccatcggcaacagccatttttccaaacagctcttctccatttactccgtaatacgttacttcccgcacttccggtgaataattcagataataaaccacttcttttccaagatcattcgttcccttcttgataatcaccgggaactccacttcctgctcagagccccacagccctgcatctttcagcacatccgcaagaatctcccgcagcatcgcatcgctcgtccagcatcccagataagtagccgttccctttccatacacatttctcgtcactgccgcataccgcttccagttataatgatcataagaagccagcacctgcgctccttccgggttcaccagttccatgaaatttttcaactcgttatcttcgcagtgatacgtctctcccgacaacttcacctctttcgggaacgtaaaatgactgtaggaaatacccagacactgatccagaatatgcggctggctgtcgtggaacaccttcagattctcatccgtaaaaccggtcttaaatgtcgtaaacaaatgaccacctgctgccacataatcattgatcttctgaagcagggactccggtgctgcatacagagccggcaccaccagcagatcataccgatcaaaactctctgtctccggccacaggaaatcacattccacattcagcttatataactgatcatagacataccgaaccacatcattgtatttgcatgcgccgccaccgcccgcggttccgtcgatcgggaaccagtccagagccgtctgcgcttcgttgctcaccaggaaaccgactttgttgtgctttttcagattcaccagatgacttcccagttccgcaaattccttaccgatcacttttgcggaacgataggtatcattttccttaaaatcatggctcagcagtcccttccagtaagtctcaagagaattatggatcgaatgccagtgccagtattccaccatatttgctccggaagccagatggctgaacgcctgcaggcgaagctgtccgtcatacggaacccatcccgggaatccctgtgcttctgtttccagaacaaaataattatcttctttcagagaacgggtactgtccccgccataggaaatctctgcaccggtcagttcgtcctgggtcggatgataaatgtccgcacctgctaccgtcagcgcctttgccgcatgtttatgatccaccatcggctgtactccgtaggaatatccccgccagtcaaaatcaaagttatgggtgataaactgatcttcccttgcatactctttcacaatatccgcctgccactgcagataatcatccaccagcgttctctggaacttctggaactctgcgccaaggcttccgttgattgttccacgcacatccgggaaatcctcccacgcgttgatccggttactccagtaatccagaccaaacgcctgattcatcgcatccagatcatcgttgaactttgtgcgaagatattttacaaactgctcctgcacattttttcctgctgtatcataatattttgtctcattatccagctggaaaccaatcacacattttctgtgcgcagacacttccatcagttttcggatcacacgttcaccgtaatagcgatataccggatgcgtgatatccatgatctgacgcgccccgtagatgcccggtcccctctttgtggttgccagtacatccgggtgggattttaccatccaggtcgggatcgcatacgtcggtgttccaatgatcactgagatgccggccgcttccatcgcatccagtacccgagtcacatggctgaaatcaaacaccccttcctggggttcacaggtactccaggtagactcggcgatacggaccagattgatccctgccgcctttatcatttccacatctttgtccaaccggtcacacggcatatactcatcgtaatacgccaccccatacaataatctatccattcgataaccctctctttttgttattttccactacttttgcagatttgctattctaattttacctgttgtatggtcatccggtcaactatgtccatacatatttctgaaaataattgtaactattcagaaggtagtatcccgcgaggtgttttggcatgttttttgccaaactcccgagacatacaaggcaaaatgccatcaccgaaggtgatttggaatgcattttgactcgtaactgtgagggtactgaacagttacaaataatttaaagcagaacgagactgcaccaacgttccttgtcagtacagcctctcttttccttttcttaaaaaaatagttatttatcctatattattcacggctatgccgtgtgaagtggctgaaagccacatgattactgtattttaattgaatattgctgtttcacctatcaagtgaataaaaaaagagcatccatttgtggtaaaattaaggtgtcgaatcttaaataataacccaaagaagccctttatgagtattgtaaacaccttatcactagaaagcaatagacagaataaattttgatggaggagatttatcctccgatgcaggcttacttcttatcaaagaattcgtaagcaaacttggcattgataaacttttcagtcactcatttaagacaaatgattctgcatcatttagatatcacactgacaaggagaatctccttcagatgatatatatgatcattgcaggttactttgaagatgatgcttcagatgaacttacaaatgatccagtatttaaaccagtgctaaataaagatgctttagcttcacaacctacggtatcaagattctttaaccgtatggatgaagatactttaaaccaattccttacaattggcagaatacttcgaaaaagagtttacagtgttcagatgccacaggctgtcattctggatttggattccactcttcttgatgcatacggtaaacagaaaggcagagcctttaactttcattatcaaagcaatggataccatccgcttgttatgtaatccggctgaaggagaatggtattctccgtggaaaaacatcccatcttgtggatgagcttgatgaaatcactagaaataacaaagtcgattatgcagtagtttatggtgaattcatgtacaaagctggtccatggccttatgaaagacgtgtagtatgcaaggttgaaaagccggaaaaccagatggtttacatgtacacattcattgtcacaaacatggattcatcaccagagtatcttatcaaattttactgtaagcgaggactgatggaaaactttatcaaagagagtaaatctggttttgagattttacttccgtaagcagtcatacccgaattctaaatgccaacagacttcaagtacacgctcttgcgtataacatatttaattggtttagacgattggcgttatcagcaaatatgcgaaagtaacgtattgataccgtccgtttaaaactgctgaagattgctgtaaaagtagttcgttcagcaagatatatcacattcaagctttgcagtagttgccctttaagagtgaattctataagacaatttttaatatcggcaagctaaatgtacagctggaatagcacctattaacgaaccttaacagtttaacaattgctctgaactctgcgatagggactttgcgcccttttgacagagaaattgagcgatgttatgactgcatggagcatttttaatttcatggtacagttatcagttcagatattgttccatgaataatttaggcgtaataatgagagttcctatttttttatcgtatatttcattctatccttctcctcttccaccgggcagttacccggctcattttgtctggtaaatctttgccatatccagtacataaaggggatagaatacatatccgccaaaattctttctaagcaccacttcactggccatatcctggatatagacattggcggcatcatctgccagaattgtttccattttcttgtaaagttcaacctgttctgtgtcatcaatgctcttctgcacctgctcgtagagtttatcatattcttcgttattgaagttgataaagttcttggaggcatccgaggtaaaccgctccagcagtgcccggccgcttaaatagacggcatccacaccaaccacagtagactggaactttctgtctgtgtagacatcgctgagccagctgtcccactcaacaagctggatttttgcattgacgccaatctgttttaactgttctaccagaatctgggcagtatccacatgctactgataattggagggcactgtgatagtcatatcaaatccatccggaaatcccacctctgcaagcagttcctttgccttagctgtatcctggctgtatttgtcagccagttcgggcatataatacttttcaaaggccggaaacatactgctgccgatgatagtttctttaccgtcagctatcatgtccagcacatcctggcggtttactgcataacagagtgcctgacgaacctttacatcgttaaaaggctcctctgcattgttcagatacaaagcctgcaccagattcatgccgccctcatagatggtaaagtccttttcatcaagctggcccgtctgggtggaatccagtcttgcaaacatgtcaatagagccgccttttaatcctgtcacaatggcgttgctgtctgctacaactttaaaagtcacttcatccagataagcctgatgtcccttgtcccagtagtctgcgaactttttcaccttaatattctcctgaggtgaacgtgactcatacataaagggatcggttcccacaggctgtgtatccagatctgccccgtcctttggcactacggctactatcaggtacgccagaaattccgtatccgcctctttcagattgatcaccaccgttttctcatcaggagtccggacattatccacattagaaaacgccgctatcaacggctctgttccatccgtgataccggcgcatctctcaatcgagtatttaacgtcttctacggtaacatccgccccattgtggaattttaccccttcacgcaaagtaaaggtgtaagtcttgccgtcttccgaaatggtgtgcgactgggctaccgcatcgatatagtttccctgttcatcaggctttaccagcccttcataaatattgaataggacttctttcgttcctgccgctaccgatttgtgtgggtcaagactatcctcaaggtcctaagtaattcctactacaatggaacctcccatggttggttccgcttttgtttctgtggaactttcgttgtttgcgaactctttaccgctttcctttttgtcctggcatccgccaagtacagtagtcagggtaagtgcaaagagaagtaatgctaattttcctgctcttttcatggtttctccttttgtagcggattcggagacagattgcaagatatttatcagcttcagtcataatccagcatatatctttgaaatgtcaatgcctcccgggcatcaaggtcaagcatttcttctgttacacaattatacatatttctccagatttttatatcctttccgacagttccacccatctgtacaaaaggctccataactgcagcgccatgataccgaatatcttcaagtgcctcacgtatctccctccagggcatccttcctttaccaggcaccattcggttgcattcaccagtatgaaaatgccccagccattggcccgatgtgcggatagcttcacccatgctcacctcttctatattcatatgaaaggtatccaacataagttttacattatccatatttatttcttccacaaacttttttccttcacaggccgtattaataagataattctcaaaccggttcagcacttccatacacaatgttatcccatacactttagctgtctcacccattaaaccaactccttccacacttcttttccatgtttcttccttggaaaacggaaggctgtaatcaacgggccaatatgaatataacgctccccctataagattgatatccatctcagccatgttattgaaaagttttttataaaattccagcgctttgactcttatattcttatcaccagagctgatatcctgtgtttttaaaggcccatgtcctgctgttatacgaataccgcacattttcgctttatttttaatttttttcatatacccggaggtatattcagctaaaggtcccgcagcaatttccaaaatatcgaaacctaattctgcggctttttcgatataatataaataatcgccgctccattccttttcccaatatgcataataaattccatgctgtaatttcattactgtccacctcatttctttccaaactgttcccgaaacattttcggagatattcccgcaaaacggttaaaaacataattaaagttaacagaactctggaacccagtctcctcagcaatctcatatatctttttatcagactccaacaaaagttttttggcttcttcaatcctaattctatttagatatgaaagaaagttttcacctgtttcctccttaaataccctgcttatataatgttcattcagatgaaatactctggacaaaagagcaagggaaatatctgaactataatttttctgcagatattctgcaatcatccctactgtatttccgtaccttcttcccctttgatgtctataatccttcagacataaagtatatacttcttctaagtcttccaggttattacaggcatacagcttttcataccattcttcacaaaggaccacatcctgctctgagatttgatacatcatattctgcagatgataaatcaactgccgcctgctcatacagaacgctttcccaagaatcctgcacaacatagaaaacttctctatatgtattcctatattgtcaattccgtcagacaaccccatagattccgccaaacggctgcattctttcatttcctcctcatccgcaaatctgatactactatatttttgaattcccgaattataaaaaaacgcagcttcgtatgcagtgtgcgcctgtccgcaggtttccaaaatcttgtctggttgattttgccatgaacttattcccgataccaaatccatatttataaatcttttcaccatagaccgaagcgcaatggccgtttcctctgcttttctttcgataaaagcaccatcataaaatcctgttgtaagcaggaaaaaatatcttccctgctttggcacaataaaccagatattttttctctgactgcaaaattctgttatcagattttctgttgttttgtacaacaccttttcatcaaaatttaccttctgctgcttcttcctggctacccccaccagcgaactgtatatgaaacaaaaactacgttcttcaaatagcttttttgtttctgatgaaaatatttcctgttcatttggtttctcatcgcctgctattttctgtaaaaacagaacttccggactaacctcttcctgtaacagagattttctctcttcttttctgcagtcctgttgaatttgaagcataatttttagtaaatcctcatatcccatccttggcttatgaatatagtcatatgcgcctgactgcatagcgctttttacagacatgaaatcatccagaccgcttattatgattactttggtaggaattttctctaattgtataatcttaagtatatccaggccagacattcctggcattttaatgtcaagcagtaaaatgtgaggtaagaattttctcaccatctgtatggcttcattgccgtctgctgcttccccgagaagcttaaagccatttttttcccaatcaacacttgacttaattccaattcttaccaacaattcatcttcagcgataactaccgttgtatcgtacactatgtctgatttctccttcatattattcctccaggcctttgtatgtctattctctaattatagctaaaggatatgagaaattctataaaaaagttcattttacatatattaccattattgaaacactgaaaaatattcatcaaaaaatgcttctgtattaacgctgcaggcaatctcatgctttccattcaaattttcttcaaacaaagtatatcccatcaaagatttgctgcctaattcaacagatacatttccacgtacaaatttgcagacactatcattaaaaatactgaccactgccaatgggtcatgaaaacatacctcatcttttgtcctgaaccaaacacctgccatatccaaaatcgggcggaacaggggatgttctgcacatcttttttgaaattcatccattggcagagtaactctatgcgtcatatccacaccaacagaacgatgtatatttcctgtattttggtaaactactgctgttgcgtaagggtcgattaaagcattcatttccagtgaacctcctgccatgaacttttttatgttatgaggctcaaaagcagaaaaatcgccgtcacctgcatcatcttccctgtaccaatttttaaaatcatattcactgaatttgccgcacatgaggtataaacctttcagcaatgatggtatctccgaatccaaaagaaatagcctggcaatattgcccataggcgaaattcccactaatacaatttctcccggattttccctgatcgttctctgcataaatgatagtgcctgatcttcaggaaatttttcttcgtgctgccatctttcaagaaccgcagactgaggcgcgaatttttctttctgttcaatcagaatacattcctcatttccgggataaataggaatatcccctctattagcggctttacatataacacttgccagttttgcccgggttttcgcttcacctgtcacagtggtaatccccattaattcacattctggtttcataagcaggtatgccaaagccagtgcatcatctatatctgtcccgatatccgtatctaaaataatttttattttatccattgaaaaaatacctccattttgttaatctaaaattatcatttgaatgaaaagagggcggctatgtatataaaatttctgagtattacaaagactcttcgtttccgcattttatttcctttgatgcttatcatcttatcagttagctttttggaaatttactatttaaatcattatgcctttaccgttgtagaagatattgttttagacacaaaagctaaaaatgcctctcaggttctaaacggcatagagcgctatttttccaacattgaaactatagcaaaaaaaccgctgaacaccatagagatatcttctcttctgaggaaagattatactaatctgtcaataactgaaaaatcaaaggacaaatattctattcagatgtttctgttccgtgaaatcatgctaccaaatcccgacatcgagtcttctttaatatacgacacatctgaaaaggactattacgccatcagtgatacctatgcactttataaagacagttattacagctttaatgcccatgatactgatttctcaaaactgcaggcaacggacggtgttcctttcataagcggaattaaaaaaagtaatatgctggtacagccccatgatgattatattgtcacttacggaatcgggtttaataatcatttcaaaaccgaaaattctctctatggggctttttatattaatattaaggcctctgcttttgctgaattatgcagtcggaattatgttgaaaatacaggggactgttatcttttagaccagaatgatcacattgtgttttgtgaacaaaaggatttaatagggactgatatctgcgatagcttccctttaaagaatcaattaaaaaataccacggcctctgccatatcggataaacaatatgtatacacccttaccaatgtgtcagatacaactggctggcgtgttgccaccatttcaaatacatccaatgtcttcagctaccgccagactattttttatactatactgctgagtatgatgctccttattcttatcatcaccttcactatttggatggttatatcaaactttacaaaacctatcactacaatgaaacaaaagcttctgcaggtttcaaatggtgaccttcaggtaacttttgaaaattcccctggtgaaatcggagaagtcaatggaatgattcagcatatgctggacgaaatcaaccatctgataaaacagatttatcacgaagaaaatgtaaagcgtgaactacagcttcattctctgcaaaatcagattacgccacattttatctacaatactctcagccgtttgaaatggatggctgcaatacagcaggcagactctctggctgaagccttaggttccttctcagacattctttcttattgtatgaaaagtacggattatttcatagaattacaggaagaaataacttttcttaccaactatataaaaattatgaatttgagaatgctgaatgaagtacaagtacattttgaaataccggaagcactaaaaaagacaaagattttaagatttttaatacagccaattattgaaaatgtatttcttcatgcttttcaaggtgtagaacacgaatgtttgcttgctattaccgctaaatctgagaaaagttgtattactttttatatcgaagataatggaattggtatgtcttcagaacaaatcgcacacctatttcaaacggagactccttctgaaagccatacccattcctccatagctctgaataatgtacagcagcgtatacaatatcattatggttctgcctatggtatcactgtgcaaagtacacttggaaaaaataccatcgtggttattcagataccctattaggccgttaatccggattcgcttttacggcagccctcatttcttcagccgcctgtttacagccatcttcaggagaaatttctcctgccattacggatgaaaacgcacggtcaaaaatattgctgatttctgtaaaagaagttggattctgcatcggataagagccatcaggtaaagtatcaaaaatatcctgattaatataccctttatccgttgtagggtccgtcagcgttacatctgttctggacgggatattagcagtatcattggagtatttttccacccagtcttttcctgttgtgtaaaaacagcaggctgctgctaaatcatacttacttgtactgctgcagacttcaaaatttccaatggcatattcttgtctgtcggaatacttctgaggcacacgcacaactgctacatctgtaaattcattggaattacaataattaatcatccatctccctgcatttgtcattgctacatgtccgtcaaccaactgttgcagataatcgtaatttttgtcaggagtaggggcaattccattctttaccgcatcagcacaaaatttcataagttctatggacgcatcactgtcaaaagtcacctctttgtagtcatcatccagatatcctgttccaaatgagtaaagccactgattataaacaaaataataatctggaatcgcccaggcgtactgtttattaccattttcatctggtttcgaaagtacctccagataatgttcaaactcatcccatgtccagtctatatccggaacttcaagtcctgcttttttcagcctgtccgtattaagccacatataggttgtctgatagaaacaaggcagtccgtatattttaccatctacttctcttgccttttccagagaatccggggtaacttttacaaactcatcccattcttccggatgctcagaaatgtaatcatcaagaggcgcacataatccaagagaatttgccatacgtccgccttcatgtgggttttgatacaaatccggcccgtttccggagaccatcatagtctgcaattttgtaaggtaatctgcccatccgtcatgtgcaatcactacaatttctacttcacagttattttgttcttcaaatcctctgaacatttcttccattggcgccgttccttctgtttctgaaatagaactggaagaaaccgccactttcaatacctccttttttgatgtatcctgactcttcacttctgaaactttttcatcagacacatctttcgttggtttttcccctgtgccacagcccattacctgacatgcaagtattgctgccaaacctgctgccgccagtttttttgttacctttactttctttcgcattttttacctcctgctttttattttttattttgaatgcataactgccttcaactcttgacacctgatatcatattcccttgcattaaatatttctgtccaaatatataaataatcatgggcggtattaatgtaagcagcactgccgaggtcatcagcggcatattggaattgccgtctgtggtattcaataccgtaattcctaaaggaagggtcattttcgcagtgctgtttaaaaaaatcatggcgctgaagaaattattccatacgcttacaaaatgcattacaaatgctaccataatagttgatttactcataggcagaataactctgaaaaatatagtcagcttccctgccccgtcacataccgccgcctcatcataactttttggaatggtcatcataaactgtctcagcatgagtaatccaaggggataatatattgaagttacaattaaagcccatttcgtatcaattaaattcagttttcttattataagaaatacaggtacaattatggattgtacgggtatcattaaacccgccaacataaatataaaaagaatattttttcctttaaaattaattcgtgcaaaagcataagctgccatactggtaaacaacaccataaatgccgccgcaagaaaagttataaaaaggctgttccacgcaaatttcaaaatcggaattgcatgaaatacttgcttaaaattatccaggttgaattgggtaggccaaaaactgggcggcagcacaaaagattctttggattgccgcatagaagttcccaacatccatccaataggcattaacattaaaactgtaatcatcaccataattgcataatgtattaccctaaaaaatactttttttattttaccatgcattttttaatctcctctactcataatcataatttacccattttttctgcaaataaagttgaagcgctgtcaaaataaataccgcaataaataaaagtgctgccacactggatgcatatcccatatcataagattggaaagctttctcataaataaacatggcaactgtcctcgtattatctccaggtcctccatgtgtaagaaaataaggttcatcaaatgcctgcatagttcctatcatcgttgtgagcaatacatagaaaatagatggtgttaacagaggaaggactatttttctgaataatgtccattcacctgcgccgtcgattctggctgcctcataataggttacaggaatattttcaaatccaataagataatacaaaaaatgcagcccggaaaatttccaaatactaaaaataacaatagaaatcattgcgaactttgaagatgtaagccagggaatcccttctgtaataatccccaattcctttagtgcccagttaaagactcctaaatctttattaaataagtatccccacgcaatagaaactgaagcagttgtagcaatggcagggaaataaatggctgttctgcaaatatgttttaaatatttattacctattctgtagacaccataggccagcaaaagactgcagcatacatgagccggaactaaaaataacggcaagcgtatcacgttccatgcaatttgtggtattgatgaatcttgcagtaaccttttgaaattctcaagacctacccattggggactgttcattatattatatttagtaaacccaagataaaataaagttattattaccggtaatgcagtaaatatcacaaagaataaaaaaagcggggtaataaataaatatccttgaaaattctccttcctgtgtctgtcctttgcagatatcttagtaaaagctttcattgcctgtctcctccctctgtgttgatttctgaattaattataacaactggtttttctattaaacataaagaaaggggacgtgattttaaaaattctttaccctaaaatcggacacaaaaaatagcccacaaaaagtgtggactatctttaacacatgatttaatttttttatgaaagtgtaagcctaaattattcatggaacaatatctgaactgataactgtaccatgaaattaaaaatgctctatgcagtcataacatcgctcaatttctctgtcaaaagggcgcaaaatccctatcgcagagttcagagcaattgttaaactgtcaaggttcgttaataggtgctattccagctgtacatttagcttgccgatattaaaaattgtcttatagaattcactcttaaagggcaactactgcaaagcttgaatgtgatatatcttgctgaacgaactacttttacagcaatcttcagcagttttaaacggacggtatcaatacgttactttcgcatatttgctgataacgccaatcgtctaaaccaattaaatatgttatacgcaagagcgtgtacttgaagtctgttggcatttagaattcgggtatgactgcttacggaagtaaaatctcaaaaccagatttactctctttgataaagttttccatcagtcctcgcttacagtaaaatttgataagatactctggtgatgaatccatgtttgtgacaatgaatgtgtacatgtaaaccatctggttttccggcttttcaaccttgcatactacacgtctttcataaggccatggaccagctttgtacatgaattcaccataaactactgcataatcgactttgttatttctagtgatttcatcaagctcatccacaagatgggatgtttttccacggagaataccattctccttcagccggattacataacaagcggatggtatccattgctttgataatgaaagttaaaggctctgcctttctgtttaccgtatgcatcaagaagagtggaatccaaatccagaatgacagcctgtggcatctgaacactgtaaactctttttcgaagtattctgccaattgtaaggaattggtttaaagtatcttcatccatacggttaaagaatcttgataccgtaggttgtgaagctaaagcatctttatttagcactggtttaaatactggatcatttgtaagttcatctgaagcatcatcttcaaagtaacctgcaatgatcatatatatcatctgaaggagattctccttgtcagtgtgatatctaaatgatgcagaatcatttgtcttaaatgagtgactgaaaagtttatcaatgccaagtttgcttacgaattctttgataagaagtaagcctgcatcggaggataaatctcctccatcaaaatttattctgtctattgctttctagtataacgaatattaaataattgctatattaaattgatactgcttcctcttcactgatttcatccattttatacttccagtgataaaccacgggttcacggttcacttcgtcaaagtacttgtaaattcgttcttccaactcctgtttggtattgacacgaattcctcgaagcatctgtctggtcatcttgctgaagaagctttcaatcatgtttaaccatgagccatgttttggtgtaaacacaaatttaaaacgtccctttggcatagtatccagaaagcgccgtgtttctttggaagtatgtgcagaatgattatccaggatgatccgaatggtatcctgtgatggatattttttgtccagtatctttaaaaactcaataaaatcagaactcttatgggtctcacttactaacggaattgcttctccagtgagtaaatcaatgccagccagtaaagagagcgttcccagacgtttgtattctgcatcacgatatacttccccatgttctgatgtcgggcgtaaatccggtaccgtattggagattgcctgaatgcccggcttctcatcatacgataccgtaatcgtcagtttataatcgtctggaacaatgagatcaccattttcatcaaactgcatttcaatctgcttataaaccaacagaacctcatgcatttttgattcaaaatcaggatcccgtttttcacagtaatatttgattttaaagggtttcatatcctgttccttaagaaatttctggatatacggtttggtaacggttgaaagccttggatatcccgcttcttctgcatgtttctgaatgtatttgtggagagaggtcaacgtccacaattcctgtgcataaccgagttctgtcggtctctgacacgcaatatgaatcatccatgcttttgcatcatcagtgatttccgatggacgtccaggacgctgaacatcaaacagtgcagcatctaaaccgcctttctgaaacttcgaaatacaaaggcgtaccgttgcggtactaatggcaagtttatcagcaatttgctggaatgtcattccatcggctttatataaaaggattctggcacggtccacaacttgtgcctgaatggttctctttttggataatgctttaaggtaatctctgtcttcatctgacagaggaagatatgtttttctcatagtgttcatcctttcttagataacactattttaccatacattatcctcaaaatatatagtagaaatttaatttattctatactagtgataaggtgtttacaatactcataaagggctcctttgggttattatttaagattcgacaccttaattttaccacaaatggatgctctttttttattcacttgataggtgaaacagcaatattcaattaaaatacagtaatcatgtggctttcagccacttcacacggcatagccgtgaataaatataggtttatttatacttccgctcttttaaccctggcattttataaaacacttcccaccagatacaccacaaacgcagccacccaggcgatcacacactgtccgatcacaacaccgaccgcccatttgcttccaagctccctcttaatggatgcaattgctgccacacacggcgtatacagaaggcagaacaccagaaggctggctgccgataccggtgtgatacatccaagcagcgccgacgtctgaccaaacagtacagacaaggtagataccacgctctctttagccatgaatccggtaatcaatgccgtagaaatccgccagtcaccaaatcccatcggtgcaaataccggtgcgatcacactggccaccgtcgccaggatactctcctgagaatcactgacaatattcagatggctgctaaaggtctgtaagaaccagatcaccagtgttgccataaaaatcacggtaaacgcacgctgcaaaaagtcttttgccttatcccacagaaggtgtcccacattcttggctcccggcatccggtaattgggcagttccatcacgaacggtacagcattgcctttaaaaagagtcccacggaataccagtgccatcaggatacccatcagaataccgccaaaatacaaagcgatcatcaccagtgcgccatgcttcgggaaaaatgccgccgcaaaaaaagcatagatgggaagctttgccgaacaactcataaacggtgtcagaagaatcgtcatcttacggtcacgttccgaaggcaacgttctgctcgccataactcccggtactgtacatccaaagcctaccagcatcggtacgatacttcttccggaaagtccgatctttctgagcagcttgtccatcacaaaagccacccttgccatatatccgctgtcttccagcatagataaaaagaaaaacagtgtaacgatgatcggcaggaaactcaggacacttcccacgccggtaaagattccatccattaccagagaccgaaggacactgttgacattcgctgcccccatccactgatccaccagacctcccagcgcatcgatacttacttccaggatattctgtaaaaaagcaccgatcactccaaaagtcaggaaaaataccagccccatgatcccgataaaacacggaatcgccgtgtattttccggtgagtatcttatcgatcttcacacttcgcagatgctctttactctcccgtggtttgaccactgtctcatcgcagacattttcaatgaaatcaaatcgcatgtgcgcaattgccgccgcccggtcaagaccacgctctgtttccatctgtttcacgatatgctccagcatttctttttcattctgatccagtttcaatgcctcgagaatcagcgtatccccttctgccagcttcgccgccgcaaaacggacaggtatctgtgctgcctttgcatgatcttcgatcagatgcatgatcgcatgcagacatctatgtaccgcgccaccatcttcattggcatcacagtaatctgtctcccttggccgttcctgatattttgccacatgcagagcatgggctaccagttcatcaataccttcattcttcgccgccgaaataggaaccacaggtatccccagcatctcttccatctgattgaccagaatcgatccgccgttttcccgtacctcatccatcatattcagggcaagcaccatcggaatatccagctccatcagctgcatggtcagatacagattccgctcaatattggtagcatccacaatgttgatgattcctttcggatgttcattcagcacaaaatttcttgtaacgatctcctcactggaatatggggacatggaatagattcccggaagatcggtcaccagtgtgttttcttttcccctgatagttccatcttttcggtccaccgttactcccggaaagttacccacatgctgactggatccggtcagctgattaaacagtgtggtttttccacagttctgattccccgcaagtgcaaatgtcagcacctctgtatccggcaaaggatgttccgtttccttctcatgatatttaccaccctctccaagtcccggatgggggattactgttcgttcttttttttccggttttacctgtccggcatcccgtatattttcaatctcgattttctccgcatctgcaagacgcagtgtcagttcataactgtgaatccgcagttccaccggatctcccatgggagcgtactttactactgttacctctccctgtggaatcagtcccatatccagaaaatgctgacgcagcgccccttctccgcctaccgagcgaatcgttgctgtctttcctaccggtaaatctcttaatgtcatgactgcattcctcttttctttattttcttgctgtcatccgtccgaaggtttccagaatctcaaaatcctcccgacaactatgtagattttatccttaatgataatatttatcaatagaaaaccccaaaatatctccaaaaagtatctgaaccctccttattcttgcttcctttttttcttttctcatgatatgattgcatatgttatgctgtttggtatctgtgtgtctgttgaacagttgtcttttaccgatattacatatgaagggaagggattttatgaaaaagacacagcttaaaaattctctgcttctgctgctgacagccaccatctggggggtggctttcgtagcccagagtgttggtatggatcacgtgggtccgtttactttcaacgctgttcgaagcatcatcggaggaatcgtcctgattccatgcattttctttctggatcacagaaaatctgaccaaaaagaggaactgccatcgcctcaacaacaggcagaacagaccagtacactgattctcggcggtgtctgctgcggtattcttctggcacttgccagcagttttcagcagatgggcatccagtatacaacggtcggacgtgcaggatttatcactgcctgctatattgttatcgttccgattcttggccatttctttctgaggaaaaaatgcggcgccaccatctggatcgctgttgcacttgcactggcaggactgtatctgctttgcatcacagacggtttttccgttggaaaaggggatctgctggtcatggtatgttccctgctgttttccttacatattctggtaatcgactatttttcgcccaaggttgacggtgtgaaaatgtcctgtatccagttttttgtctgcggattcttatgtgcgatcccggctgtctttacggaacatatcgtattggcagatatctttgccgcctgggcaccgattctttatgccggtgtgatgtcctgcggtgttgcgtacaccctgcagatcatcggacagaaagatatgaacccgactgtggcttctctgatcttaagtctggaatcctgcatctcggtactggcaggctggatccttctgaaccagaagctttccgcacgggagttatcaggatgtgtgctgatgtttgcagcgatcattctggcacagcttccctccgggaaaaaagcataaaatcccgagacatacaagtcaaaatgccatcaccgaaggtgattagaaatgcattttggctcataactgtgagggtacggaagagttacgaaatttgtaaatggcaaattgagtaattaaatttcaaaaaagggttgacgaatcatctgtaaccaagtatgattataaacagattcgcactgcaacgcgttgaagtgcaaaattctttattttttatggaggcttttgaaattatggaaatggatatggaattcttacggaaactaccaaccccgaaggagttaaaagaacagtttccggtaagtgaaaaaatagcagcaatcaaagaggatcgcgacagacagatccgtgaaatcttcgagggaaaagatgaccggcttctgctgatcatcggaccttgttccgccgacaatgaagatgcggtgatcgattacatcagccgtcttcgtactgtacaggataaggtggcagataagatttttatgattccgcgaatttataccaacaaaccgagaaccatcggtatgggatacaagggtatgttgcatcagccggatccggaaaaaaaagaagacatgttaaagggtatcatcgcgatccgtgacctgcataccagagcagtcaatgagacgggatttacctgtgccgatgagatgctgtacccggaaaatcacagatatttatcggatctgttgtcttacgttgccatcggtgcccgttctgtcgaagaccagcagcaccgtctgaccgccagcggcgttggcatcccggcaggtatgaagaacccgaccggcggagatatttctgtcatgatgaattctatcatcgccgcacagcatggtcatatgttcctgtaccgcggctgggaagtaaaaactcccggtaatccttacgcacatgcgattctgcgtggttatgtggacaaattcggaagaaatatgccgaactatcattacgaagatctgcagaatctcctggaacactatcaggaagtcaacgaatccgctcagacaaagctggtaaatcctgctgttatcatagacaccaatcattccaactccggaaaacggtttgcggaacagatccgtatcagtaaggatgttatgcacagctgtaaggtttcagaagatgttcataaactggtgaagggactgatgatcgagagttatatcgaggacggtgctcagaaggtgagcgaacactgttatggaaaatcgattacggatccttgtctgggttgggagaaaaccgagaaattgatttatgaactggcggagctttggtaagagagacgttatttttgctagagcgtgtctgaaaaaggcttttcgtgagctgcgagtctcagtttgtgggagattttatccgaatgagggcggcgtagcgggctacggcaactgaatgagggtaaaatataccgcaaagtggggcttgcagattgcggaaatgatttttcagacacgctctaaagcggacgcggaaaggctcccggttcccgggtggggcaacatgggcagggtaactttgagctagtcgctaacttcggctatcattcgcgagggtcagctgaccctcgcgaaagcctatgtaagcgccggatctcaaagcttaccctaaccgcccataaagtgttgccccacccgggaaccgggagcctttccgctggtttttcatgtaatctgatttattaaaataaaatgtttcttgcgcatttttgtacctgtctcattgctgaataataatccttgtatttgctcaaccattagttatacagaattaattttcagatagttcaaaaatgatgccttgcctcctggcattcctttacgagactactttataagcggaatcgggctataataatacccaatcatccccgcaccggaatgatacggaagaatgaattctccctgcgcatatgccaacagctcctcatattttcttacagtctctatgaatttttccatgaattttttcatacgaatcctctcctctcatttcagactgactatgagtctcctatgtaacaaaaaaagcagaacaaggatactgttcgaacccccttgttctgcttttctatatcataccacttcttttttctctgtgcaatcccttttttacgttacttcggtaaatttatctttttcccgtgatatctcggttttctccatagattgtaaatccatttcgtccgttccgtttcgtctcatataatgcctggtctgcgcttcggtacagattcagataggtttttccatgctccggagccagcgcgattcccacactgatcgtaataccccttccagccatctcgtcaaacaccagctttttcgtctctgccagcaactgctccgcctttgttctgacggcctcttttgtagttacatttcgcatcaggataataaactcatcgccgccgattcgtcccactatatcatccccacgaaactgtcttcccagcaacgcaccgaaagtatgaagcaccgcatctcccaccgcatgtccgtagacatcattgacttctttaaacctgtctatatccatgatgaaaaacgcatggatacttccgtctttcgcctcttccagtgcattttcggcaaaccgttccgcgtatttacggttgtacacctgtgtcagttcatccgtctgtgcagactggagaatcgcttccgtcttctgacgattctttcggacaatatataagatcagaagacagaccagaattccaaaacatccaagaaataccatctcgtacttttccacgaatgcataggactgctgcgcaaccgtcaccgatgcaacatagcagatcatccagtcattgatcccaagtggagcatatgccagatatctgtcggaaccatcggcgtaaccggccagccgaaccagcccttcctctcccatagcaaagttctgttttacctcaccgatactatgcccttcccgtgtcgtctttgactcataaaaagtaaatatatcttctccataagaaaacttatgatcctccggatctccggtatgagcaactatttttccttctctggtaacgatcagactatatccattgccggaaaacaaatcatcaaacagcatctggctcagttcaccgacattacaggaaccacacagaataccaatcacttcatcctcatgaaatactggaacacccagtaccactctcgtctcctggtccacactactctccagtggatcgcttaaagtccggttcccactgattccctctttaaaatacctccggtgtgaaacatttttctctactccgttatcgtaatatgcatttccctccggatcgatcaatgccagccggtccagtgatgtatttttttgaaaaacagtaagtacttccttattttcttcattcataagttcattgctttccgctatcttctcagcaaccccttccagatatgaataatgaatatttaaaattgtacggagatgttcgctctgtctggctacatttgttttcattctctcctgtgaactgctgtcaattgttttctgtgcaaccacataaaagaatatcagtccgattcctaccgccagaataaacactgacatcgcccctacataatttctggccagatcctgtctctttttcttattaataagccctcaacccctccctgttcttttttcttttttaatataacagaaatatgtcttaaatactacttgtttctcgatgttcttctatcttttcctcgacattttataacctgtattttccctggtcagcgtttcataaataactataccatacacgcaggatacagattcgagtgtgcagctttaaaaacgtaggcgtagcgagctacggcaaccgaatgagagtaaaatataccgcaaagtggggcgtgcagattgcgggaatgatttttcaaacacgctctagagcgtgtttgaaaaataaaaattgcacaaaccaaatgttgcatttccctttttcatgataaaataaagaaaaaggggtgttcagtatgttgagacgatatgagttaacagatgaagaatggaaccgtattgcaccattactccctcctgaaaatacaggaaaacagggacgtccacgaaaagataaccgcatccttcttaatgggatggtctggttggcacgcagtggtgcaccctggcgagatcttccagaacgttatggttcctggcaaactgtatatagtcgttttcgtaaatggattgatgacgggattctggataatatttttcgcattctaagcctagaggctgaactggaagaattatctatagacgcttccattgttcaggctcaccaacatagcgcaggtgctaaaaaaggggggcctcgaatgaaatcggacacagccgtggaggagccagtaccaaaatccatgcaatagtagattcttatggctatccagtgtattttatgatcagtgaagggcagcgtaatgatatcaattatgcaattcctttactggatcatatcgaaatagatggaagcaaggttctggcagaccgtggatacgacagtaatcaattgatagattacatttacgatcatggcggtgaaccaaccattccatcccgccgaggagctaaatttgaacgtcgctgcaattggtggttttataaggaaagacatctggtcgaaaattactttctgaaattgaaagcatttcgccggatagcaacacgttatgacaaattagcatttacttacctagggttcttatgcatcgtctcaatattaatttggttaaaatgaacaacttaaaatgtttttcaaacacgctctagtacttttcaaaatattaaatctgtattataatcaataaaacaaactgtatattgtatataaaggaggctcttatggaaccaaatattattactctgactgaccagtacggcgaatctgtccgctttgaacttctggatattgtagaatacgaagaccaggaatttgctgttctttatcctgcggacggcggagacgatgaacctgttcatatcctgcgaatcacttctgaaaatctggatctggatgaaatggaattcgaaggtctggacgacgaggatctcatcgatgccgtatttgatctgttctgtgaacgcaatgattttgaataaatattggtaactattcagtaactgccgtgaaggaactgaacagtgttgctgggcacagagtgaacagttactgagtattaataaagcggagaaagctcttgactttttctccgttttgttttatattagtatcagtaataattactgttattatttatggaaaggaggatctctatgacctctctgaaatacagccgtcagcgggaatctatcaaagagtttctgatgacacgtaccgatcatcctacggctgataccgtataccatcagctgcgcaagatttatcctaatatcagtcttggaactgtctaccgcaacctggctctgctggccgatatcggggagattcagaagatctgtaccggagatggtgctgaccgcttcgacggacaggtcagacctcattaccatgtgatctgtacccgctgccatcaggtgatggatctggacctggattacatgaaagagccggaggctctggccgcggaacattttgaaggaaagattctgggacatgtcacaaacttctatggcatctgccccgactgtctgaaaaaagatacgatgtaaacgcttcctgtgttgtcagaaacaagatcgaaaatcaaaagatttttaaaatcatcttgacaatcaggaagcaatatgttaatctaatatcagtaacaattactattatcaatttaaactcaagaagacgaattgcatagaatattcgttttcaagataaactacaaaaaagaaaaggagactgacactatgaagaaatttgtttgtactgtatgtggatatgtttatgaaggagaaactgcaccggaagtctgtccggtatgtaaagcaccggcttccaagttcaaagagcagagcggagaaaaaacatgggctgctgaacatgttgtaggtgtagcaaaaggtgttccggaagatattctggctgatctgagagcaaacttcgaaggtgaatgctctgaagtcggtatgtatctggctatggctcgtgtagctcacagagaaggatatccggaaatcggtctgtactgggaaaaagctgcttacgaagaagctgaacatgcagcaaaattcgctgaactgcttggtgaagttgtaaccgacagcacaaagaaaaacctggaaatgcgtgtagatgctgagcacggtgcaaccgaaggaaaattcgatctggctaaacgtgcaaaagcagctaacctggatgcaatccatgataccgttcatgaaatggcaaaagatgaagcaagacacggaaaagcattcgaaggtctgctgaaaagatatttcggctaagatttatctacagattctatatcggtataagatacccgcggttgaacagctgttcaaccgcgggtattttatgcagacaaccccttcataatcctattgagcagaccacattctaaaaattttcttaaacctttctgttcttctctcctttcactagcatctttttctcttttcctgtatactgaatattaacaacgatggacgtgacatattactgtttggaggtgttgatcatgaaagacaacttaggttatgtacatgtatattgcggagatggaaagggaaaaactactactgcaatgggactttgtacccgcgctgcaggttatggatataaggttctgatctatcagtttatgaaaaataacaaaaccagtgaacggaagattctgcaacagattccgaatatcacttttgttgatgggctggaacaggaaaagttcagtttccagatgacaatttccgaaaaactggaacggaaaacttactatgaaaaacaattccgcaaaatcactgcaaaagcggcagaagaaaattatgacttgctgttttttgatgaactgatctatacgatacgcgcgggtcttttcgacgagcagattctgctggattatctgaagaatgagaaaccggcacatctggaagttattctgaccggtcagcagcccagtgaagaactgatggctcttgcagactatgtttcggagattcgtaaaatcaaacatccctttgatcagggtcttcccgcccgccccggaattgaaaaataaatgaaataaaataaatcagaaagtacagagaaaattgtatggacgcattaaaatatgtatcacagattcttgacgatgcggattcctgggaaaccatgatgtttctctatgatgctgcccttcgccagatgtccacaaaaattgacattttgaatgaggaatttattcacattcataattacaatccaatcgaacacgtgaagtcccggatcaaagaaccgaaaagtatcgtcaaaaaattaaaacgccacggtcacgaagtgactctggagaatatgttaaagtatatcaccgacatcgccggtattcgtatcatctgttcctttacccaggatatttaccggattgctgatatgctggcaaagcagtcggatctgcgcgttgtggaacttaccgactacatcactcacccgaaagtcagcggataccgtagctatcatatgctggtggccgtcccggtacatctgtcagaccgtgtggtggatatcatcgtagaagtacagattcgaaccatcgcccaggacttctgggccagcctggagcataagatttactacaagttcgagggcagcgcaccggaatatatcagcaaagatctccgtgcctgcgcagaatttgtagctgaactggatgataagatgctttctctgaacgaagcgatccaaagtgaggcacttcgcaaagcagagaagccggattcaaaaaaagaagagtaactgttaaaaaacagttactcctctttacacaggcaacaaacaaaaatttccctctaacatgaggagtgcccggatacctctcgatacccgggctattattatgaaaaaattctatgtgtaatgaacccattacaaacttttttgagatgttcctttcggaactgtatttatcatatcaatagtttatgaataatttatgaacgtaatatgaacttatagttaatttgcacaattcaattttatttttattttatttttataacattttacactgttttttcatttttacttttcctgttcttgtgctgattcatcaaattattctgttatttcttttcatccctccgacatcttagccaaaaatagaattccatatatttttacaccagcttactatcctgtcaaagaaccctttgacctgttcctggttaatgttcagatccaggctctccagcttgttgtacagatctttcgcctgctctttcagggaatccacatccagatccaggctgctgattttctccatcagacttacaatcttctgcttatcctcatcagacaactgaatattcatctcttttgctgcatcgtctacgacagcttctatttcttccggatcagacaggtcctgagagacgacagcttcttttactgcacctaccagttcctccgcctgctctttatccccgatagcttcacccagatcactggtggttaccagttcttctgtagccgcatctgcattctctgccttcagggtctcgccggtcatattactgtaagcttccattgcacctaccagcgccgctgttccggagatattaaacggtccagccacacgtacatccgcatcggtaacgcctgcagttgccagcgcattctgatacatacctgtggtacagtaagtgatattactggttgtcactttaattccatttcctttatcctttttttcaataagaacagaagaaagtgctctggttccgatcacactggaatccagataagaatccagatatttgtgttcatccgcattcgttacagtaattacctgatagctgctcagatccgcttcattaatctccagcagactcagtacagtggatttttctgtttcattcagatccgctcccagcgccagatacggtgcatcaatctgatctgcttttgcactcagtggtgacatcaggcttcccattaccgttaccatcgccaacattcccgccataactttctttatcttcatctctgttacctctctttttctttatatactttcagaatcttttcagtcttttcccgactgatactccgtagtataacacactttccttccatgatgcagatattcataaatcttttcctgttcattcataaaatcttcacaacttcaacacgattttctcacaattcccggatatactataaccataaaataattaatagaaattattttataacttttctttttcatatgtcgatgaaaatcgacactccttcctttaaaaataaaactaaaacgtgttgaccggaatttcctcattctggtcaacacgtttttacgttactttttattttgcacgtcccaatacatttgccagtttcgcaaattcttccaaagacaatgcctctcctctcaccgatggtgaaaatccgcactctgcgattgcagcctctattgtctctttttcaaaagacaacccctcataattcttcagaccgtttgccagcgtttttcttctctgattaaacgatgcccgaataatctgaaacaacagtttttcatcgtctacctgtaccggtgtctcagcatggcgggtcagacgaatcaccgcacttcccactttcggtctcggcataaaacagttcggtggaacattggcaacaatataaggttttgcatagtactgcactgccagagataatgcaccgtaatctttcgttcccgggcccacctgcatacgatccgctacttctttctgtaccatgacagtaatggattctacaggcacatggctttcaaacagacccataatgatcggtgtcgtgatataatatggaagatttgcaaccactttgatcgggcggcctccatttttctcttctgccagctttgcaatatccactttcaggatatcttcattgatcaccgttacattgtcataatcgctcagcgtatcctccaggatcgggatcagacttttatcaatctccaccgcacatacctctctggctgcatatgccagatactgtgtcatcgttcccatacccggtccgatctccagaacaaaatcatcctctgtaatctccgccgcacggataattttatccagcacatgaggatcgatcagaaagttctgtccaaactttttctgaaatgtaaagccgtatttgttcaacacagcaatggttgcctggggattgccaagataaggctctctcttactcatagttcttcctttcctgttgttttccaaaacgtgtaaaaagggcatagctttctgtcgccatgccccatgttgtcatgctcttttataaatcaaaatccttttcataaagaagaattcgaccgtctgcatctgtatgacgtttggaaagttttcttcccagctttacgccacttgccttacggatcgcaccgtctaccatctcttttacttttccgatagtaatcggttcatcctctttctggttatctccgatcatggtatacagagcaagcacacccatctcatccatgcggaaaccattttctctcgcatacgttcttgcaaatgttaccagctcgtcattggtaaagaccggaatcgaaataacggtttcgaatttttctgcaaattccggataatccgccagcatcttacgcatatttgctttatcatcttcaatcagaagaatcatactgtctgtacggaaatccatcgcctgagcaagtttttcgatcgtctccggcgtcataaaacttgctctctcgatcagaaggaagcctcctgccatcttgctgataattgttgccggatcttttctgttaatatccgatgcatccagatttgcatacttgacagctttcagtcccagttctttgcagattgcttttacaagcccttcactcagtctggtttttcctgttccgtgacttcccatgattgcgatatttccacgatgagatgttttctcactggcatattcatatgccccgtgaatcgcatccagaatctgatcatccatgcccggcactttagcaaagtacgaaaacagctgtttctgttctgccgtcagacgttccggtctggtattgttcaggatcctctggcgtttttcttcgggtgtctcccgttccaaagtcatctcgctgatatccggctgtatctctgcttcttccagcatcttatcgatatggtcaccttccggttcctctgcctccgtttcagaaccttcttccacaacagattcctctgtagtattctcttctgtaatcggctctgtcttttcttcaaaagcaatttcttcctcagatgctgtctccggatccaggctcgcagaccgttctgcttcttcctgttccctgagctcatccataccgctcagagcagctttgagttcttcttccaaattaaattcctgtgtatctcccggtgtcgcatgccatgcatcctgctttgtcacatccggaatcgctcttgtcgcgtccagatcttcgatttccggttctgtttcctccgtttcttccggatattccatctcaatcaccggtgctgcttctgatccggtaatatcttcttctgtttcctgctcttctgtcaattccgccgaagtttcagtttccggttccacggcttccggtgcatcagacgatgtttcttctgcaaaatccagagaaagtccggaaagacttgcttcaaaagctgccatcgcttcatccgccgcatccgtcagagtttctgccggctctttttcttccgttactgtctcaaccgctccctcaaccctttcttccagtacatcaccggctgtatctactgtttcttctgcaactacttcttccggttcaccgatgatttcttctgctgttacttcctccacagccggttcttcctcagctttttctgcggcatcctcgcctgcttctttcgccagggaagacgaagtctctgcaaataatgcatccagatccacttcctgaacactgatgatttctttatcctccggtttttccaccttcggtttttccatcatttccagttcgtccatctcggttctgctcactccggcaactccgctgtccgcagagatgatgccttcatttacagcttccggctccagatcctgtacgtgatagtcttccatattttcttcttgtgcttcaggttcctgcggaacttctgctcctgctgctcttcccagtgcctcaaaagcatctactgccttggtacggttaaaaccggaaagaatctcctgaaaacttctggaaagacgttcctgaagtttttcggtatcgatatgcggaatctctgtttccggtttcaccggctcttcctccgtcgccggagtttcttccacagttgttcctgcagattcctgcggaatctctgctgttactgccacttcttcctgagcctgttctttctcttcttccactttctgaagacccgccattgcagctgctgacacacccggcagaattgtattttttacttcttctgtcagtttcggtcctgctgttggttttgcaacctttcctgccgccttcgctttctcatatttttctttctgagacggtgacagtggcgtgtatgtcatcttaagttccatcgctttggttacatatttgccttcaccaaaccacagaaccagatcatcacaggtttcaacacatttcttttcctgtcctgcttttttatacagttttgccagttcatatacccagcgttctgtgtattcccgctctttatattcctccagaatcgcaatctgatcttccagaggcgctttctgtgctttgtaaatcttatatttcagaatatatttggaagtatcgttggaagcagtctccagatattcattataatattttacagcatcatcatataaccccatcttcaaagccagttccacctgacggtacagaatcatcttgccgatcgatgaacgtttatgcgccagctgcagcatctgcatactcttttccagttcaccattcacttcgtagatatctgctaccatacacaaggtccgcacactcttcactctacgccagtcgatagaatccgctaccgtaagagccccttcataatcctgtgcatccacaagtctgttgatttcctccaatttcaaatggtattctgtcttatccactgtactcacctctgctttttctatcaaatttataactgtctgatactttcacagttatctgttttcagttgtttatacccgtaactgttaaagtactgaacagttacccataattgttctaagtgtaccatactgcctgtttcttgtcaaaatataactgtcctctgaccgagacagttattgataaaatgatgtgtatgaacaaacaaagggatgccgccctccgacaacacccctcttatgtatacgggagtcagtcccccttttggttcttctgtcacccgattctcagtttaaacttctgaatttctttttcactggtcacacgctcaatctctgcgcccagactcttcagttttccttcgaaatcctcatatccacgctgaatatatacgatatcatccacaattgtaataccctctgcagccagtccggcaattaccagtgccgcgcctgcacgaagatccggtgcactgactcttgcgcctgtcagtttgtccacaccatcaatgatggctgtattaccttccacttttacacaggcacccatacgggtcagctcgtccgcatatttgaaacggttctcaaaaatgctttccgtaacaatgctggttcctgatgccagagccagtgctactgcgatctgtggctgcatatccgtaggatatcccggatacggtaaggtttttacatgcgttctgcgcagtttctttgcagagatcacacgtactgcatcatcaaattcttccacttcacatccgatttcttctaatttggctgtaatcgcttccagatgtttcggaattacatttttgatcagaatatcgccgcgtgttgccgctgcagcgaacatataggttcctgcctcgatcatatccggcacaatcgaataatttgtactgtgcagcatctccacacctcggatacggatcacatccgtaccggcacctttgatattggcacccatgctgttcaggaagtttgctgtatctacaacatgtggctcttttgccgcattttcaataatggtatttccttttgccatagatgctgccatcataatattaatggttgcacctaccgatacagtatccatgaaaatatgagttccatgaagtccgtccggtgcagatgccacgatggcaccgtatttgatatcgacggttgcacccagtgcacggaagcctttcagatgcaggtcaatcgggcggcttccgatgttacagccacccggcagaggtacttctgcttttttatattttccgagaagcgcacccagcagataataggatgcacggattttcttgatatattcgtaatctacactgatatcaccgatcgtggaaccgttgatcactgcagtgtgacggtctacccgctccacttttgctccgattcctccgatggcctctaaaagtacatttatatcattgacatccggaaggttttccagccggacggtatcatctgtcataatagcggctgcaagaatcgcaagtgctgcattcttcgctccaccaatctctacttcaccaactaacgggtttccacccttaataatatactgatccatagttcacctctatgtttatattcagccaatacaagtcccgataatccctctcattgatttttatgttataacaaatcaatgcttttgtaaataaattttaaagatttcttatctttttattcatattgtccactgaatttttcaaataattttacagaatatcgtgactattcagtatcttcactgtttagttccagactgtctacaatactctgtaaagtctcctctaaatttttgttttcctcatcaattgtgatatctgcatatttttcatacaataccacacgttcttcatataaatcttttaatgtctgtccgtcccgcaaaaccactccacggtttttcaggttgcccagccgtttcctcagagctttgtaggacaatttcagataaatgaccgtggcaatctctccaagatgctccatagcttctcttccgtacaccacgctgcctcctgtggcaattactgtgcgattcgcttcaatagaagcgtttacttgattttcaattgcaataaagccttcgataccctcttcactgataatttcttttaataatctcttttcttgcttctgaatcagaaggtctgcatctacaaactgataacctaactcttttgcaagtattacaccaattgtactttttccaactccgggcattccaattaacactatattcttcatatctctcatccttatcgcagcttatcattttatcatattatcttagttaatacaagtttttattcctgtttgttattcgagaacaaacaatgtgttactgtaacaacaatgtgccccggcacattattttcatcataccacaattttccatgtaagggaacttaaaactcacgaataaaggattctactacatccgaatgttcttcatttctccagaccagcagcacatcggtgatcaattccttttctgcgatcggaatcggacagatcttttccgactgtcctctcatggaagccggaagaatcgctgttcccaatccgctggctgccagactcatggctgttctggcatcctcacattcataataaacatcacaggaaagaccatgtttttcaaaaatggacaacacatactttctgtgacgcttggaaaggatcagatgatgtccggccagttcttccagtgtcagttcccgaagaccttcttcttcctgtccctgcggaaccatagccattaattgttcctgtcgcagtagtttggatcagaatccgtttaaggcgatcggcgtacgaagtgtagtcacatcaaggattccgttttccagctcatctttcagtgtaaaggtagatccgtcatggatcacaaaacgaatatccggatgatggctggtgtactttaccagatattttgccatcatattcaccgtggatggcgtcacaccaagatggatcgtcgttgcctggctgactttgatcacttctcttttcgtaatatccgtcatggtcagaagactttctgcccgcacatacagtgcttttccagcctctgtcaatcggatatgtttacttccccgcgcaaacaggcgtacctgcagttcttcttccagcattttcatctggtaactaagcggcggctgtgtcatatgcagggctctggccgcaccgctgatagttccctcatctacaattgcacgaaaatattccagctgtttgatctccatagtttcctccgttttcctttctcatatctatatagaaattattttttatttatataaaaacaatatttttcatatattataatctgtgctacactaaaagcacaacagcaatttacctaaattttacacagatgcatgacggtagcacaacgcatatacctgcatcatctacctcatacacaaaggagttttatcatgaaacagattgactttgaacatgggaaaatcaccgataatatcttgcgggcttccattccgatgcttgtggcggaggttttaagcctgctctacaatattgtggaccgaatctatattgcaaggatcccggatgtgggaaccacagcgcttggagctgtcgggctgtgttttccgatcattacgattattcttgctttcagtaacctcttcggttccggcggtgcgccgcttttttcgatcgagcgtggaagaaaagatacgaaagaggcttcgatgatcatgaatacctcattctttctgatctgtgtctgtgccctgcttctgatggctgtcggtatgatctttgcgaaaccgattctgcttctgttcggaagttcggaaaacggactgatctacgcgtatccttatctgatgatctatctgctcggaacttttccttctatggtttctaccggtatgaatccatttatcaatgcgcagggatacgccaccacagggatgttctctgtagcgatcggtgcaattgccaacctgatcctggatccggtttttatctttgtgttcggactcggtatccgcggtgcggcgatcgctacggtgttatcacagattctttctgcagcgtttgtcctgtattttctgcagaaaaagaccgaattgaaagtccgtcttctgtccggagaagaaatccgtgactgcggaaggcgggcaaaaaatattatcagcctcggaaccgcaggttttatcatgcagcttaccaacagtctggtgacgatctgctgcaacaatgtactttcggtcaccggaggcgatctgtatatctccgtgatgacgatcgtatcgagtatccgacagatcatcgatacaccgatccatgccattaccgaaggttcctccccggtcatcagttataactatggcgcacgccggcctaagagagtgttccagtcctggctcaccatgagcgtgatggcgattctgtatacactgctcgcctggggcgtgatcctgtttgcaccgcgtttcctgatcggtatcttcagttccgaccaggcgctgatcaccgatgcgatcccggcactgaaactgtacttcggagcctttgtttttcaggcactccagtatgtgggacagacgatgttcaagtcactgggcaagaaaaaattcgcgattttcttctctctgcttcgcaaggtcatcatcgtggttccgcttacctacatccttccgtatctgttccatatgggaagtgacggtgtcttcctcgcagaaccggtatccaatgtgcttggcggaagcgcctgcttcatcgtgatgctgtgtacggtaatgccggagctgaaacgaatggcaaaggaaaattctgattgctagtataacgaatattaaataattgctatattaaattgatactgcttcctcttcactgatttcatccattttatacttccagtgataaaccacgggttcacggttcacttcgtcaaagtacttgtaaattcgttcttccaactcctgtttggtattgacacgaattcctcgaagcatctgtctggtcatcttgctgaagaagctttcaatcatgtttaaccatgagccatgttttggtgtaaacacaaatttaaaacgtccctttggcatagtatccagaaagcgccgtgtttctttggaagtatgtgcagaatgattatccaggatgatccgaatggtatcctgtgatggatattttttgtccagtatctttaaaaactcaataaaatcagaactcttatgggtctcacttactaacggaattgcttctccagtgagtaaatcaatgccagccagtaaagagagcgttcccagacgtttgtattctgcatcacgatatacttccccatgttctgatgtcgggcgtaaatccggtaccgtattggagattgcctgaatgcccggcttctcatcatacgataccgtaatcgtcagtttataatcgtctggaacaatgagatcaccattttcatcaaactgcatttcaatctgcttataaaccaacagaacctcatgcatttttgattcaaaatcaggatcccgtttttcacagtaatatttgattttaaagggtttcatatcctgttccttaagaaatttctggatatacggtttggtaacggttgaaagccttggatatcccgcttcttctgcatgtttctgaatgtatttgtggagagaggtcaacgtccacaattcctgtgcataaccgagttctgtcggtctctgacacgcaatatgaatcatccatgcttttgcatcatcagtgatttccgatggacgtccaggacgctgaacatcaaacagtgcagcatctaaaccgcctttctgaaacttcgaaatacaaaggcgtaccgttgcggtactaatggcaagtttatcagcaatttgctggaatgtcattccatcggctttatataaaaggattctggcacggtccacaacttgtgcctgaatggttctctttttggataatgctttaaggtaatctctgtcttcatctgacagaggaagatatgtttttctcatagtgttcatcctttcttagataacactattttaccatacattatcctcaaaatatatagtagaaatttaatttattctatactagtttacataattttaattttagatatcattgcagatccacagcaagattcatacgccaccgcaaacatctgcaatataatcttggtttctttactccataaaaaaacttcagcagacacaatggctttcttctgtctgatgaagttttttattttttattcaaatttcgtaactgttcagtaccttcacagttacgagtcaaaatgcatttaaaatcaccttcggtgatggcattttgacttgtatgtctcgggtttttggcatattcatgccaaaacacctcgcgggatattacctactgaatagttaccaaatttcttatttctgtttctgaacatccgctgctctctcttcttctcggagccgttccagtttctccttcaccgtaggataccgctccagatcggtatggggaagtgcctgtgctgccaccattgtattcaaaaaatcttctaccgctgcgaactggatatacaccattttctccaggatctcctccacttcttttgccacaccgcaatccagcagtgcacataccgcaccttccagggaagaattgcccgcatggatgatccggtcccgttccatgtccgggtacatgccgatagcgatcgcggattctttggacacgtgttttccaaaagcgcccgccacatagaatccttccagttccgaaagttcgatcccagactcccgcagcatgatcgccaccatcgtgtatgccgccgcttttgtccggataaattcttcgatgtcactctggtaaaaatacagctccggtgcatagttcaccgccagcatcccgtctttctccacgatccaccggcttttctccggctgtaagatcccccggatatcgatccatccatgcaaaaacaattccgccagaagatccacaatcccggatccgcagattcctttcgccgttgcctccccgatcacgtggcagtgcagttctccatcttccatttttacccgatccaccgcgccttccatcgcgcgcatgcccgtctttaccacaccgccttccagtgcaggtcccgcagctcccgcaccgcataacagaaaatcccggttccccagtacgagttccccgttcgttccgatatcgaaaaaagcgttgatcttctcttttttatagattcccgtagccaccatgccgctgatgatatcgccgcccaggtaattggactttgccggataaatgtaaacatatcccttcaccggcagttccagatcttttgccgggagaaatccgggctggtctgcgtgcaccgcatacggagtgtggaagacacagaacgcatccatcccaagcagaaaatgaatcatcgttgtattgcccccgattgccatcgcgatacagctgttttccggtaactgctgctgtgcttccagttctctcacacaggtggtaatgctggttaccgctgcttttcgaaggatctccagcgttccacggtcttcctgacagtgaaagattctggtcagaatgtccgttccatagggaatctgcccgttgaacgtgctggtttcgcctaggatctttcctgtcgcgcagtccaccagacgggcaaccacggtggtgcttcccagatccaccgccacaccgtaatgtaacccggtggtatctcccgcttccagatccacgccatgccacgtctgaccgtcccacgccagcgacacggtcactttccactctgcctcttcgcacagcggatatagttttcgcagtacccgcaggcttacttttgcctcaatcccctgttcctttaatccgtcctggatccttctctgatcggaccggttatcgtcctcggtcggagcctgaagttccagatatatttttttactgattccgtccatgattattcctctttttctattgcgttgcttctattatacttctttcttcccaaataaccaagttatggattgcgtcggagatccaattaacgtatacttaattttatataagaacatactttctggtaacagatgcggatatccgcagaaaggaggacattcatggatcgcatcatttttcatatcgatgtcaattccgcatatctgagctggagcgcaattgatctcttacaggcaaatccggacagcgtggatatccggacgattcccgcgatcatcggcggcaaccggaagacccgccatgggatcgttctggcaaagtctctgtcagcgaaaaatacttaccatatccatactgcggaaccggtggcaaatgctctgaaaaaatgtccgacgctcaccatcattcctcctgaccacgactcttacagccgccacagcaaacagtttgtcggttttctgcgctctctgacatcggaaattgaacaggtcagtgtggatgaatgttacctggactatacttccattgcttcccgtttttcttgtccggaagaaggcgcggcctatatccgcaactatatttacagccattttggttttacagtcaatgtcgggatctcttcgaataaagttctggcaaagatggcttctgactttgaaaagccgaacaagacgcacacacttttcccgaatgaaattcagaagaaaatgtggccacttccgatcagcagtctgttcatggcaggacatgcttccgtagctgtcctgcagaaactggatatccatacgattggcgatctggctcggatggatccggcgattctcagtctgcatctgaaaagccacggaaaaatgctgtgggaatatgcaaacggaatcgataattccatcatcgaaagcgaaccgtctcaggcaaaagggatcggcaattccaccaccctcgccagtgatcttacgaccgcgcaggaagcgtactctattcttctgcagctttccaccaaggtagggcaccgtctcgaaaaagccgatcagtctgccaataacctgtgcgtggagatcaaatacgcgacatttgacaaatacacccgccagatgccactgtcctccccgacacaggatgggaaaaagctgtatcgcgcagcctgtcatctttttgataccctctggaacggaaacccgatccgtttactgggagttcgtgccggaaaactgacggatgctgatgaaccggtacagctcgatctgttcagttatgacccgaaagcgattgaaaaagaacagaagatggaacgggcgatggataagatccgggaaaagtttgggaaagatctgattcagaagggaatccattaaatatgccaaaataccttgcggaatagttctattttccacatgcaaaaatccccacagcggacacaaactgtccactgtggggatttttgttgtttattgtttgaacattacttattacttgcgtttgaaaattagcagataccctgtgctaacatagcatcagcaactttttcgaatccggcaatgttggcacctactacatagttgccttcgaatccgtaacgttttgctgcatcatccatgttgtgggtgatgttgatcatgatgtttttcagttttgcatctacttcttcgaatgtccagctcagtctctcgctgttctgagacatttccagtgcggatgttgctacaccaccggcgtttgctgctttaccaggtgcaaagattacgttgtttgcctgcagatactgggtagcttccagagtggtaggcatgttagcaccttcgcatacagcgatggttccgtttgctaccagctgttttgcatcttccagatgcagttcgttctgtgttgcacatggcagtgccagatcagctttgatctgccatacgcctcttccttcatggtattcagcgtttgtacgaacttttacatactctgtcagtcttgctctcttcacttctttgatttctttcagaagtgctacatcgattccgtccggatcgtaaacccaaccggtagaatcagaacaggtcagaacttttacacccagctgctgcgctttctggattgcgtagattgctacgttacctgcaccggatacaactgcagtctttcctgcgatgtcgataccatttaattttaacagttcctgtgtcaggtacagcagaccataaccggtagcttctgttcttgccagagatccaccataggtcagtcctttacctgtcagaactccttcgtatacgtttctcagtctcttgtactgaccaaacatgtaaccgatctctcttgcgccggttccgatatcaccagccggtacgtctgtatctgcgccgatgtgtttgctcagctctgtcataaagctctggcagaatttcatgatttcacgatcagattttcctttcggatcgaaatcagaaccacctttaccaccaccgattggcagtccggtcagggagtttttgaagatctgctcaaatcccaggaatttgatgatacccaggtttactgatggatgcagacgaagacctcctttgtaaggtccgattgcactgttgaactgtacacgatatcctttgtttacatgtgcctggccctgatcatctacccacggtacacggaacataataactctttcaggctcaacgatacgctccagcaaagcttcttttctgtacttttcttcatttgcatcaattaccggacgcagagaatccagtacttctttgacagcctggtggaattctggttcgttaggatttttagccacaacgttttcatatacttcatctacataagacatgttacacgtccctccttagaatttgctcattgctttttgaatacgcagacattatagcatggtaaagtgttaaacacaagaaaaaattttcgttttttcgacctatttcctactttttcgcttggatttacgttttctcacactgtacccgaaagtaccgagctgctttcctacaccatagtacgttccatgggaatacaccatcgggtgtgcgctgttcagatcaaaccggccattttcatccatataatcttcgtctgcatgaacagcaactacctgtgcaagaaacatgtgatgggaaccaagcttctctgtttttacgaccttacactcgatattcaccggtgactccccgatcattccacagttcacctgggaggcttccacacaagtcagtttcatctctttgaatttgtccacgtcttttccggaacggacaccgcagtaatcggtcgcatacgtaagtgcttccgtagtcagattgatcacaaaaacaccgctctcttcgatcatatgatacgaatagcgctccggccgcaccgaaatggataccatcggcgggttggtacacaccgtacctgcccacgctacggtaatgatattgtcttttccttcgttatcccgcaccgagaccataaccgccggaagcggatacagcatgttgccgggtttccactgttgtttcgccatatatttttcctttactgctgtaatgcattcataaacttcggaatcagctgtttctttctcgataccacaccttccagacgacaggaactgtcttccactttctctccgaatgcctcatataccagtccatccgatccctctccgtaacacagaagttccgtggactccttgatgatgttggtcagcatgaagaacaccatcttgattccatgtttgccacattctttttccatatacggcatcaggcggtctttgaccgtctgcagttcttcctcggacatgaagctgatctgtcccacaccgaatgccaggtcatccacaataaatttcttataatcctgataaaagatttcttccgatgtcttactgctcagattgcttccggcacggaacattttattggcaaagctttcgatctcgatcttggcgatctttgccagttcctgcgctgcctctttatcacgttccgtacaggtcggtgagcggaacatcagcgtatctgacagaatcgccgcacacagaagtccggcgatattttccgggatctccagatatttttccgcgtagatctcatacataatggttgcggtacagcctaccggctggttgcggaacatgattggctggaaggtctccagagaaccgattctgtgatgatccaggatctccaagatctctgcctcttcgatgttgtcgaccgcctgggatctctcgttatgatcgaccaggatcagctgtttcttcttgatgctcatgaagtttcgacgggaaaccgtaccgatgtattttccacgggtattgaccaccgggaatgcacggtaacgggtcttcgtcataatgtctttgatcttgtcggtaaaatcatcgctccggaagatcaccagattgtcttttttcataaaatacttgatcgggatactctggtgaatcaggcgggcaacggtgaaggaatcgtacggtgtggaaatgatcacctgatttctctcctctgccagtttctggatcgtctttccgactttggctcccagacatacgatcagacagcttgcattggcttcgatggcacacaactggtcttccgcacggtttccgagaatcaccagatcgtcctcatcgataaaactctccatcgtatccggctgggacagtcccataaccactttccctttgataaagtatccgtgttcattacccacgatgatctggccatccacagtatctgcgatactccggtactgtgttcttgcctgggcgagcaatgtattgtcatacgcatccatataggatttggcgatgtctccggtcgtgatcaggccttcaaccttgccttctttgtctgtgatcggcagtgttaccgcattatgctcctgcatcagtttccatgcccgcttcacagacatgctgtttgccgctcccggtgtctcatgaagatccatgtctttcacctgggttcccacatccggcagataaccgggtgccggcacatgaaaatatttcagtacaaattctgtttcttcattgatctgtccggctctctttgccacatacgttcccttggttgttcgattcttgatgtcggcatatgcgatcgcagaacagatcgaatccgtgtccggattcttgtgtccgatgacataaactttattatcttttctcacaaataatcccctaactgttgttcccggcatttgtcagacaactcttctgccttctgccggaatctgcttggtctataatttctgatttttatcttagcatacttaaaaaaaatcagcaaacagatttgttatctttctatgtactattccccgtacatacaaccggtatgtgccggaatctttctattttctgttgccagattccgggaaacaacgctataataatagaaacagcagattcgtgcaaagaaaggatgaatatactatggcagaagaagaaaaagtaacagcggttgccgaagaggcaacttccatggcagattatgagaaggagctggaggcttcttttaaaaagatcgaagagggcgatatgatcaccggtacggtgatcgctgtagacgaagaagagatcacactggatcttcgctattacaccgaaggaatcatcaaggtttccgattacagcagagagcctggttttatggtaaaagaagcggttcatgtgggcgatgaagttacagccaccgtgatcggcagagacaaccgccgcggctgcatcctgttatcccgcgtggaagctaacgatgtgctggcatgggacaaacttcgtcagttaaaagaagacaaaaccgtgctgaacgttaccgtaaaaggcatcgtcagtgcaggtgtcatcgcatatgtagaaggaatccgtggatttatcccggcttccaaactttccctgaattacgtggaagatctgaacgaatacctgaacaaggagatacaggtacaggtttttgatgtcgaagaagaggacaaccgtctgattctctccgcaagagaacttctgagagaaaaagcggaggaagaaagacgcgcaaaagtatccaatgtggaagtaggtcttgtgacagagggtacggtagaaagcctgcagccatacggcgctttcgtcaatctcggaaacggtctctccggtctggttcatatctcccagatcagtgaaaaaagaatcaaacatccgtccgcagttctggcagtcggcgataaagtgaaagtgaaagtcatcgctgtgaaagacggaaagctgagcctcagcatgaaagcactgcaggacgtggctgcacaggagatcgaggaagaggtttatgaacttccggagacagaagaagctactactacgcttggttctctgtttgccaatatcaaattatcataggttctgcaaactcttataacagatatctgaacgtatcatcccgtgaattcccggtgaaattcacgggatttttgatttcttaattttttataattttttaaaaaagtagttgtattttcctcacaaagcgtatatgataatatcacaacgtagttttaagaactacatatcgcagtttttaattttatttgagataggagttgatcatatgacatttaaattaaaagatcccggaagtgcaattactcattttattggtatgataatggctttgcttgcaaccatcccgctgttagtcaaggcagccagagaacctgactggttacacctgatcgcattgtcggtgtttgcgctgagtatgtttcttttatataccgcaagtaccacctaccattcactggatatcaatgcgaaggtaaatcggcggcttcagaaagtggatcatatgatgatcttcgttctgatcgcaggaagttacacaccgatctgtctgattgcactgaaaggtcacaccggcagactgttatgtattctggtatggagcgtggcactggttggtatcatcgtgaaagcctgctggatcacctgcccgaagtggttttcttctgtgatctacatcggcatgggatggctgtgtgtgctggcattttcccagatttttcacgcactgtccaaaccggcattcggatggcttctcgcaggaggtattatctacacgatcggcggtattatctatgcactgaaagtacctatttttaacgcgaaacataaaaacttcggttcccatgagattttccacctgttcgtgatgggcggaagcgcatgccactttgtgacgatgtttcttcttgcctgagtctttacagcccacatcacgaatctgctgtatttagtaaaaactatatacgtcaaaaatcctgccggaagttccatttgaaacttccggcaggatttttctattttgtcctttcttataccgtaatttttctttttgcatgttctgctgccacttcttctacggttttctctcttacaaccgctgcacccttgtatccctcacagcgaggtgttacataatgtgctttcagtttctcttttgcagctgcaattccttctttatactgtggcaaccactgttcctgtgcaaccagcatctcatcaatcatctgccatacttccggcggattgcagactgctccggtcagtggatccatcaatgctgcctgtttcagcagagcgacatctccgtgaactgcagcttccactgccagtttctgtacccagattgactgtgaacacactgctgcgcatccaagtggcagatctccaagttttggaatactgattccgttaccatctacatagcacggaacttctactacactctcatacggaagatttgtaatgcatccttcattcataacattgaaatgacctctgtattttcttccagtttccagtgattcgatgatataagagcaatgttcttttcctctttcagatccgtccaatttctttggttcttcctcacgaatctttggataatctgtttcaaaccagtttctttcttctcttgtcacacgcagatatccaccggtttccccattaatccaattatccagattgatccagtctttaatttcatccggacgttttctataccatgccacatattctgataaatgaccatttgattctgtagaatagtatccaaaccgtttcaaaatatcaattctgactttttcttcttctctgaatttctcatgtgcttcaaatcctggcagaatcttatctagcatttcttttccatgatgtttcacagacacataccatgtctgatgattgattcctgcacaagtaatatccagttcttctctcggaattcctaaaacttctgctatctgcatttctccatgaatttctccatggcaaagaccaagagttttaacaccaccgtacttattacaagcccatgttgccatagcattcggattcgaataattcagcatgattgcgcccggttctgatacttcacgaatatctttacaaaaatccagcattgccgcgattactcgttgtccgtacataataccaccagtgcacaatgtatctccaacacactgatccactccgtattttagcggaatttcgatatccgtctcaaacccttccaatccaccaacacgtacgcagtttacaatgtatcttgcatctttcaatgctgttctacgatctgttgtagcttcgataaccactggaattccatttgcatccagatctctctgacaaagttcacgtgttttctccagattatccggattgatatctgtaaatgatattgctgccttctgcagttccggtacagacatgatgtcagtaaataatgttcttgcaaaaacaaggctacctgccccaataaatgtaatttttaagctcataaaaacctcccgttattccttgttgattccatctttgccggccttagacgtttctttttatagcttcaatatatcaattttataccgtttctcacagttcttttctcattaaaaatcatacattttctactattatgcatcgattatgtatattttgctttatcttgtcatatgtatggtttttatccatcttatacttgtttttttgataatttataaagcttcacaccatgcgattttacttttgtcactatcttatccacgtttccaagatcttcccgttcccacaaatcacgaacttcataatatccttctaaacctgcttttctaaagtcaaagctgaaagtttcatcccagttagtaacattaaacagtgcaatataacagctaccttcctcatcgtgtgcaccccatgtgatcagatcaaagcttctctcaatctgatgtgcatctcgactgtctttatgcatcttcaacacttcttcatttgtcagcagcgataatgtccgggaatccagatctgtcatctccgcccctaacatcaagggcgaccggaaaatacaccataatgacatcattgttttctgttcatccggtgacaaacgacacatacgatttcccacgccatgttcacaaccaatgatagaaatatgtcctaacggcagcatatcacaatccggataacatccctcagacacatatgggctccattcattacatctggaaaacatttccataatattgtcccagctgtcccacaggtcattagtaattcgccacatatttgcattcttccgcagatgttccgctttatctaacattgccggtcccggagaaaggcttaatacgattggacgtccacatttatcaatagctcgtcgaagcatctctatctcgtctccaccataagcaagtgtactttcatcatttgttcttccatatttgacgcaaatatcatctaccttaataaaatcgacaccccaagaagcatataattccactatagaatcatagtattcctgtgcacctggtttggtgcaatcaagaccgtacatatctgaattccaacagcaaatagatgccggatgcgtaacctgccttgctgtatattctgttcctttgatttttacattctgtgacactgcctggcgtggaatacctctcataatatgaattccgaattttagtcccttattatgtacatattctgcaataggaccaaaacctttgccacctgcagacgaaggaaatcgattaggtgctggaattacacgtccaaattcgtccatacaaagatctgcaaaaagatgataatggctggaatctgcagtgggttcataccactgaatatcacatacaatatattcccaaccgtactgtttcaaatgttctgccatgtaatcggtatttttcagaagaatttcttccgtcactgccgcaccataacaatcccagctattccatcccatgggcggagtttgtgcaaatgtatttttatccatgtctatttctcctctcgtataaaataagtgccaggtaacacattgaccaattattcatcgctttactcatactgcacctgacacttactcttttttatttcgcttttatattcattttatttcaaacaatcttgcacatgtcacctgcggcattgtcacctgtaattttccattttcaactacatacttgcaatctccgcttgacggataaatcattttaacatctgcgcccataattcctgcttccgccagtggaatctctgctttatcagtttttggtgtaaatacggccagataactctttccttctgccttgatcgcatatgccagcacatcatctctggtatccgtaaagccaagcgggaatacaggaacaccctttttcacatcatcacggatttctttatacaaagaaattccttcccgcatcagttccaggctttcttctcccatatcccataccataccgctcatgtatggacgaagaagcaatccatttaccatattatagataacatgttcccgttcatccttatatggatacacccacatacctgcctgctccggtgtcacggcgcttgccacattggatgcgatataggaattataaatgtaatctgtctgatcgctggttgactgaagacttaacagtttcagcataccgtaatccatacgctgtccgccggaaccgcaattttcgatcaccagattcggatgtttacggaatatttcctgataccattcatacagatacagataatgatcacggattgcatccgcgcagctgtcggagttcagatcacttccgtaacccatggttacgttataatctactttgaagtatcccacaccataatcttcaatcagacggtctactacatccatacaatacttgcgtacttccggatttctgaaatccagaagatatctcttgttatcgatatgacgtttcccatgtcggcaaataaaccagtcatccggaagtttgtttgccagttcgcacgccactcccatgacctcaatttccaaccaaagacccatgaccatacctttttctttcgcataatcgcatacagccttcagggtgttcggaaaacgctccgacgattctttccactcaccgacacgatcccaccagaatcctttgtcataccatccacagtccaggcagtagtattcgcatcccatctctgccgctttgtcgatgatggctttttctttttcttctgtggggtcgcccatcaggcagttcatataatcattaaatacaacatttaatttttcatcatcttcattcgggcgacggatttttcttctatattcagtcagttccgccattgcctcgttaataccaccatcagacacaccgaagcatgccggtaccgttgtaaaagtatcacctggtttcaggttcttccaccatccctgctcgctctcggttgccccggaaagtgctacatacagacgttctccggtacttggaccatactcgatcaaccactgtccagaatgctctatctgaaagaaataggtttctttgcactctgtatcttcgcagatacccatcggcagatattcacaggtagaccaggagctatgtcctccatagcaatatctgttcataccaaatcccggcgtgttaaatccatcaacagccataccactcaggttgatctcgcggcagtcattctttctccactggctttcactatcccagctgttgcatggagtatagacatttgttttctcaaaatatggtttttctccgttctggcagagtccctgatagatgaaagaagatacatattccagtccgatagcctcggtgccctcatttttcaataccgtccatacctgcacagctgcagttcccggataaaattgcatatggtactcgccttttgccctgtactccgtagccgtatagatcaccagctcttttcctttttcgttctctgtaatttcatgactctggtatgtaaaatctatagatccgctgcttacattatgtttatatgcatgcattccgcggcttccttttcccgtgatctgaatctccgtaatcggataaaaatcttccgcctcacgctttttttcttttgcatcgatccgaccagacgggtcgaactgtttcagttccaccactccattatcacgaatctcaaataccacttttagttttccttcttcgatgcgaatctcttttatcatgtccatattttctcctttcttcgaatcgatttgcctttttgtaaaaaaagactacatccagattcttttgttccagatgtagccttattttcattatgcttttgttcctgtcaaagcgataccttcgataaactgtctctggaaaataatataaatgatgatcatcggaatcatcgccagaacagatccagccatcaggttcggataattaacagaaaactgtcctcttaaagttgataaacctgaggataatgtcaacttatccaacttcgtgtttacgatcaacggccacatcaaatctccatatgcaaacaatgctgtaaatactgccaatgctgccattgctgtcttggtcagcgggaaagcaatactgataaagcttctaaaatgtccacatccgtcaattcttgcggcttccagaagatcatccggaatacccatataggtctgtcgcaggaagaatgtaccgaaagcacttaccagtgccgggaacaccaacgcgaatagtgaatccgtttttcccaatgctgaaatcatttcatactgcggcagaataaacacctgtgccggaaacatcagctgggataatacgatcataaaaaacagattcttcagtggaaagttcacttttgcaaatgcatacgctgccatagaggagaataccactgcacagatcactcgaatcacaatcatcataatcgtattaaaatacaagttaaaaaatggtaaactctttgtaacctgctcatatgctgcagtattactgaatgatgccggtaacaatgttggcggtattaacgttgtttccgggactgttttaaaactggtgcttatcatccagataaatgggaatatcataagaacacttccaagtatcaaaacgagatacaccaatatgttgcctttttttatttttggtctgtttacttgttttgccatattgctgcgtcacctctctcgtctatacatcatatgtaacccatttcttctgtccgataaactgtactgctgtaatgattgcaatcagaatgacacaccatacaaccagtgctgatccataacctttgttattcttaacaaaggtctcctgatagaaattgtaaagaatcgtctcacagcttctgatcgccggattcgttttttcaatcatcatatagacaatatcgaataccttcagggaagccataacacgcatcatcaatacaaagaacaacgttggcgaaaccagaggaatcgtaatactcttaaactgctggaaagaatttgctccatcaattctcgctgcttcgtaatatgattttgaaatactctgcagaccggacagaagcaagattgcatcgtatccaacactgctccagatagtaacaatcgcacacgctaacaatgctgtcttaggatcagagatccactgaatctttgacggaagatgcagtgcacctaatacaatattaataataccgtattctgcattaaacagccatttccataccatggccactgccgcaggggcaacgaccatgggaaggaagtaaatcgctctgaatactgtcttaccattgatactctgatttaatagtactgcaattaataaaccaaggataactgtcacaggcactgtcagtaacataaataacagggtattttttgtcacagtccagaaaccggcactttgaaacatggtaacatagttgtctaatcctacaaacgtccattttccaaaagctccagacttaaagaaactcatatagacggttctgcataatggataaatattaagaagaatcagaccgagcacagtaggtaacgccatcagaaaaccaacgctggcgcccttatcatattttcttttcttctttcccatctttgccacctctcattctgtcttattcagaagcaagacactcatctacctgctgctggcactgtgcgaacgcatcatccagactcatcgttccgctgtatgcttccagcaaagttgcttcaacttccgggaaccatgtagatttggatttggaatacggatactgaacactgtactccagctgatctacgtatgcctgtacatttttaccttcataattattagcccaggaatcaccggttccgttaaatgccgggatagctgcaccattttcaccgtgaataatcgctgcttcttccgttcccaggaatttcagtacatcttttacaacatccatatgtggattatctgcggatgtagcgtatgcaagtccgttggagatgctggctcttccgtcaccggataccggatccgggcatttcggcagaactgccacatcccagttcaggtctggatagttgatatacaggttattgattccccagcttccaagatacatcatagcgccttcaccggcgaaaaaccgttctgctttaccaagatcagagaaatcactctggtttggagaaaaatcataatcggtctgccatccgatatattctgcaatacctttctgtgttgcaggatcatcaaatccggcttttgtcttatcatcattaatatagtagccacctgcctgataaatggtatttgcccatccttcctgctcattctcatctgccatcataccgtattttccggttttttcatgaatagtttcagatgcttctaccagatcatcccaggtccatgtatcatccggataggaaacacctgcttcatcaaatatgtctttgttgtatacaagaccaatggtatcaacatctttcataacaccatagattttgtcttcgtatgtaaagttctcaaccagatttgccgggaagttattgtgataatagtccgggtcttcatctgcatacaggtctgtcagatctgccagcatacctgcctctgcatatttactgaattcattggtatgcatccagaaaatatccggtaaggaattgctatttgccatagcttccagttttgtccagtactcactccatgtggagatctgcacttcgattgttacattcggatgtttttcgtgatatgcagccgccagagcttccatacccgcctgctgatagatttcccatccaagcatcgtcagtttcacttttccgtcatctcctgaagaatcggaagaaccgctgtccgttgttgctgcatctgaacttccactgtcagagtttcctgatccacaggccgtcatacttcccatcaccatacacgctaccattccgagcgccagaaatcttttcatatttttcatgcattttcctccgttttattggttatttttcttttcttttttctatccgtcctttttttgctagcattttgacgttttttactgtgtttttatagtaccacttgttgatttttaccaacacatcttttttcatcctttctctttcacattcctgcatttatgttttattttgtatagtttgcattactttgtctgatttctctctacctcccacccacgaattttcaattatttttatttatccatatacttttttcataaaattcactataataaagtttatacttagccatgtacagaagggggaaaacatatggcctgttacgtctttaactttaatcttcacgatttaaatctggttgaaatcggcaaacaaaaatgcacaccgttatattcctttggaccgtttatccgaaacgaatacatttttcattacgttatcagcggtaagggatactgctctatgggacatgatgtacaggaatcttctgttcagagacctgataagccttccggtggaccaacctctcatgaagtgagagccggagaagggtttttgatagagcctcacaccaagcatatttataatgcagatctgaacgatccctggcactatatctgggttgttttcagtggtgcctccgcacctcatcttctgcggacctgcgggctttccaaggcgaatattgtttaccatcccaaggatactacaatccagaccttgcagaatatccgccagcctctgatgaatattctcgagcatcctgatgcttctgaagctgcagttatgggaaatttttacctgtttttggatcagctgatacaaaatgctgctcatccaatcattgaaaactccaacaagggaatgttccgacagcattatgttaatcttgcctgccagtatgtctccacttattatgcaaccatccaatccctggacgaaatcgctgtttactgcaacatcagtcagagtcatcttaccagactcttccgtgaatctcttcacatgtccctgcaggaatacctgattactgctcggctgaacagagcaaaagaacttctggttacaacaaatcagtctatttccgaaatttcatgggctgtaggatacccgaatgaattgaatcttcttcgggcattcaaaagcagatatggaatctcaccaaaagaattccgtcaaaaaaaccgattgtaatttcattcgacagaattcgcgaatctggcatataaatcagcaatcactatgcctctcttataaaagctgcagcaattctctgtacataaaaacaaaaagtcagcgaactatcaatacaactatgtatccatatttcgctgactttttcacttttcttgacaggtttttcgacagtgccttttatgataataacctgatatttttaatatattaatttttctttttctttccgtgacagctgtttgatctcccactcccggcgcatagcttcttctttcgtctcaaacgcttcgtaatatgccagtgtcaccggcagacgggctcgggtgtattttgcaccctttccttcgttatgcgttttcagtcgttttgctatatcattcgtccagccggtgtaataagttccatcactgcattgcaatatatatgtataattcatttcgttcacttcccgtttttcattatacacatacctttttaaaaagggaatcaaaaaaacaaccgaaatcgtttttcccaaaacagattccggttgttctttcttttgttcttttttctaccctactatttttctgctgtattttcaatatctatttttaattcttccactgacatccccgctctgctagctgcttcctccatagataagattccatcttttaccaaaccagacaaaatcctcaccgttgcttcttttcttccatcctctatcatttcatccactgcctgacacatatctgttttctctcctcctgttttgatttttattggtgtttttgtaattattttaattacctgcgctgcctcttcttctaatttcatgcgcgggttatgtgcaatatagtttcttaactttgttttatctttggaatattttatgtagcctaacacttcccgaaggctggtggaaaatttcctcagatcttcctccgttagctttgccggatcgatcagatatattttatagtcctgaatatattccagcagctttttatcatgaaccgttatcatatctttcagacacgttggaccatcccattcttctgcaccaaaatgaatcacaagcgttattaccggaaccagatggtcatccctgtaaaatcccgacagatattctgcctgtgtcccattcctgtctttcttcttcctgtgctctgctgcaatttccattacttgttttccatactgcaaactgtcataaatcatattccttaccggcatcgcatagtggatatctgtttgattttcgattccaagcaataaataagtagtttccttattttgcatgataaccgcacgtttcagtacatcacgatatttctgttgcacttctgtttcatttttcacactgtcatttgaaaacaacacggcaagctccgttgcatctctctcctgcagcgattgtggctgaatctgtgcttccccgttataaatcaggaaagtgacatgctcccaccacttaaatcatagattttgaagtgggggcttcttgctcaatggctccactgaaccaagtatctacaagctatcctcgcgtgccccgcgattcttttgcccggacacgggcgtattttctttcttattgtccggatacggacagtttatgccgacagcatccttcttgcctcttcacggatgttgattgctgcatttcgatctctgtccatttcatttccacacgtacagcggtatactctttcagataatttcagctctttttttatctttccgcatttactgcattttttgcttgaagggaaaaaacggtctacctttactaattcttttcctttccaggcaagcttataatccagcttatcccggaacatcccgtatccattatcctgtacacttttcccaaaatgcaggcactggcccatcgctttcatatcaatatcttccaccgcaactatatcataccggtctgtgatcctgcagctcagtttatgctgatgatctcttctctgattgcgtattttttcatgacacctggcaactttctttttctgccgcacataattgtggcttccttttacacatctcgacagtttccgctgctcccttgccagtcttttttcattttttctgaaaaatcctgcttcttctgtttcgatctcctccgaaaacactgccatcccctgcatcgcataatcaatccccagtattttggcattactgtaatccttatctgctgcttggttttcgcagctgtatccttcatacagcagacttgcaaaatactttccggatggctccatacggactgttactgatttcaggcggcagttttctgcaggctccctgtgttttttcatggagatccatttcaattttggtaaccgtatccggctaccttctaccagaatatttccgttgaccacatttgttgtgtagctgtttttggaatgatgttttgacttgaaacgtggaaatccaaccttcggatcacggaaaaagtttttatatgctttctccagatgaagctggacatttgccagagccagtgaatctatttctttcagaaacggatactcttttttatacatggctggagtattttttaacatcttctttgtttttttatactcctggatcttatcattaagcatctggttgtacagaaaacgacagcagccaaatgtttttccaaggagtatcttctgttcttctgttggatagatccggaaacggtatgctatgttcaatgctttttctctccctgggtttcgatgtattgacggattacttctaccggtgcccctcctgccgtcaaaaggcagaaactctggctccagaatgcttccttccaaagtttttcccggatttccggatactcttttttcagcagcctgctgctggcacttttatatgcattgataaatttactgagttccgttttaggctgtgcacgaaacattacatgcacatggtcaatatcatgattccattcctccaaaacaattccataccgtggggcaatatattcccatatttcctttgctctttctgaaattggatcatcgataacttttcttcgatattttaccaccatgatcaggtgataatacattaaatacactgaatgtgcattgtgatccatattttccataaaaccagtcctttttttgaataatcatcttatcgactgattttattataccatggatttcgttatagaacaagtgttcttttttgtttttttgcaattcatctcccacctgtagaggaaggagaattcttgctatatattatgttaaatgcatctgcaaatatatcactcccacgcatatagttttttgttacaatgtctgtttttcccattgagcctcctttatacttactgtgcaggaggttttctgatctgtccgtttctgctttccataaaacctctctgctgttctctgaatctgaagcattgagatttctggatatggaatctggaattgaaagagatatgatatttatagatttcctagataatatagaaataataatgctttgctctatggtagcacattcccctccgcctgtccatacaggaaatgcaacaacgagataaaatacgcttcgcgaattttactcgttatcgcggcagtcaccaagttctcatacaagcatggactttggctcgttgctcgcgtaaatcaaacttggtccactggaccaattattgatatgcaatgtagcaaaatccgcctgtctgagcgaagcttcagacagacggatctttctattctgtcaccgtctcgatatagatcatcgggtcaatggggttgccgtctttggtcatggagaagtacagatttgcgccctctttgacataatattttgtcgggtcactgacgtagccaaggatggttccgctctctacggtctgtcccggttctacggtgatgtctttcagctgtccataggttgcctgatagccgtttccgagatccatgaccatggtagttcctgtctcaacatcttcgctgatggagaccacctgaccattggctgctgcctgtaccggctcgccgctttcgcagccaagcatcagggcatcgttatatttgtactgatccagtgtcggaaaatatgtggtggcatccatgctgtaatcgatcactacctgaccgttgaccggccagagcatctggctgtcctcggtaaagttcagttccggctgcacagctgcggatgtatcggcagattcccgggcatctgcggtttcctgtccattttcgtcttcctgtgccggagggattgcattgtccgggttatcctgattcatggttggcgacggagtcgcttcctgattttctgtggtattctttgccagttctccggtatcctgcgcctcggcatctttactcgtcacatctttgctctcttcctcctgctgtgctttactttcttttttcggcgttgtatccgtccggtacatggagattcccgccgcaaccacggtcagaagcagcgcaccggtaactgccatacgcaatgtcttttcttttttcatcatcttcacctctgctattctatactaaagaacaaaaccagtaaccgtccccgtcagtcccagttactcatccagattctttatctatagaattccctgattttgcagaagtatacaccgatttttcttccggtcagtagtcttttttttgcactccacattccgggaaataatatcgcagaatctctttgtacgattttccctcttttgccagcacatttcctccgtactgcgaaagtcccagcccgtgtccctgtcctttgcacaaaaaacggatctttccgtctgccgcctgcatcgtaaaattactcgacggcagttccagaagctggcggaattcctcccccgagattgtcttatttcccactgtcaagaataaaatgtgtcccactttgtcccgtttatacatatttatctgattttccactggttcttccgtaaataccagcccaggatacgctttttccaactgttcccgcagcgcgccttccgaaaaataatggccgctcagataaccgtccccatacatatcccagttactgtccacactgagaagataccctttctccatctttccaaatacttccagtccgtcccgggtagttccgctgctgatccggtgaaaaacgccctcacagactttcgactgataaaaaagcatctccccctcagtatctttgactgctgcctccatactccggtatgcctgctgataccctttctgatgctgcgctgctttcacttccctccacagtttttcccagtcttccccatccatcccagtctcttctatacgcaagtacaggctgctccttgtaagaacagcctgtacttttttcatctcctcctcatactcccaggggatttccctgcacatcatcatgggaagaagcgattccatattccattgtttttttatgcgcaacacttctctgcccgacagaaaaaccgtcagaagcagaggaagcagcagaaagatccctgtcactgccaggatcatacgaagtttttctttcatattttcacagactgcccgatgcctttttcctagtttatgaagttttatacgctttcatgtatttccaccagaatcttttctgtttcggcatctgtgtccagaactgctgctccagactctcataaaactgataacaccgggtccgatccttctttgtcagcggatccggtccgaatgatgcccgctctactagttccacaattgctgtatatgtcccctcttccatccacgggagaattttttctgtctggcgggcaaattcccggtcatcgttctgttccgggacttcctgcagcactccggcttcctttgcatcctggaaaatcccataaatcgcgtaggaaatctcacagattcccctgttgatatctttctggaaaaagcaactgtttcgctcctgcaatatctgttttctgcgaagagcaactatacccacactgccaccggccagcccgacaagaatcaacagtatcacgaaaagtttcaggaatgcatgtccgattccctccggtctctgttctccggatccattttccgtatttgtctcctgttcttctgttccctgaccattttcactctccggtgtcaacgatgcctcttcctgctccggctgtggagtttcggtaagctccggtgttgcctcccgggactgctccgcagtcggttccggtgtcagtgtgctttcctctccgatcacttcctgattgtcattttcaccggtgttctcctgataacccggtgtcacttctaccgggatccagccttttccggaacggtaaacttccacccacgcatgtgcctgcgtatccggtacttgtgccgtatagccatctccatcttccgtaaactcctccggtgtcaccacatatccggtaacatatctcgccggcacaccaagcagacggaacatcagcgttgctgttgtcgcataatgaatacagtatccttttttctggtcaaagaaaaaatattctgcaaaatcctgatccgccggaacctgttccagatccatgctgtacgtacgtccttcctgcacatcccggaccacaaagtcaataacctcctgcacggactgcagattctgcttctcacagtaagaccgcagacgatccagtccttctaccggcactttcagatattcctttgccacgtattcccgatagctgctctctatctctgattccgcatctttcgaaggctgtggatccatccactctgtccagtttacataaccctgataggtgattgttttttccgcgctggcatagcagccatccgcctggacattttcatcatccggcacctggcatccatatgggatatacccataatctcctcctggattttcccgtgtaaccgtcacactcccctgttcttccgcagagcgggaccgtatatagcggtacagaatgttctgcacctgccagccactgtcggcttccgaaaatgcatctgcaaacttcttttgctccacgccactccagtaatttccctgatacgtaccgccggtaaatccccgcagatacatattgtgtgccggtttcccggatgtatgtaccgtaaggtcgatttcatttttctgatctactggataattgttcaaacttccgtcagccgttggattgtgattgccgaacaatccattctgactttccatcgcacgggaaatctgtcgggtttttttctgtacattcagatacagccattcattccagctctttgtctgtttcgccagcacagggccgatgagtcctgccagaagtgccagactgaggatcagcactcccgcccacagaccggaacgatagaggatcctctggttgcttactccacggttttgtcccatcgcgatcagagccagcagagaacctccgaccagaaagatttccggctgcaggaaacgacagccacacagaagttccagcagtatgatcagaatctccgaagcgatcagaagtcctgcccgcccttttcgaaccacggctgtctccatactccagaaaaacaatgcgaaaactatgatcattaaaaattcaccgcgcgcaccggtaaataactgcgtcttttctgccagtgtcactccataatataccgagatctgatgtcggattccattttccagcacctgccatccggccaccaggtgtttccaacccagaacaccagacagaaaaagtacaagatatgctcccgcatacacctttcttccccacggtttccagatatttttgaggattgcaacaagtgcaaacagcaacagtacaccggctaccggaagtatccggaacttcagtcccagatccagtctgagtgtaaggatcgttcccatcagacacagatacaggtacaagcagcgcagaagcaccccatgcttttgctgccgtcttctcgattcaatttttaattttttctctcctgtcacctggatccccgcaggatgccagtcttctacctgttgtctcatacgctgatcccctccgtctcaagcccggcacgtgtcagttttcctttcaggatcccgtcttcccaccactgaccatctgtggtaatccgcagacagatactccatccatcctgcggccaggaatatttatatgcttcttccagcagaatttcttccccatacggtcctgcctgaaacagctgtgcggtcagcagatacaggtcttccgtttcccggatctccatctgttccatcttctgcatccgacagttgtaccatgctgcccgtggcgaataatcctgattcagaaatccctgcagaatcgcaagtccgtactccactgcctgatccagaaaaacagttcccccatcttcggccacccgaagatcaaagagtaccagtgctcccagtccgatcggcatactgtaatctttcaccatcagatcattcgtacgtgcgcttgctttccagtgaatgcgctgcattcgatccccttcccggtactcccggatctggaaaatctgggatggatcatctccggggcgtttttcatcgtattcttcactgtcgatcagctgttcccggatctgcggtgcaatctctatcaaagcggcatagtattccggcagtacggaaagttcttcttttccgtctgtacggatcttttttccaaacagatgaaacagatcccatactttcgcctgttccacccataacgcaaccaacccgcactgactgctggtaatggctgttgtcaggcgggtcgttcctctcccatcagccattccctgaaaaatcacttctttttccggctgataaaatctgttctgtatctttatttttgcttccagcctggataccgggatccggctcttattttcgatccgcacccccacattaaccagctgctctttttcggcaactccgatagggagatagatttgtgccttcatatgtgccgctgtccataacatcagaatgccggatataaccggcagtatcatttccatcagaccaaagcccagaagcatgggactgtcatagaggatggccagatacagtgtgaccaccaacagtccgaaatatagtaatttgttcttcattttctcaccacggaaggttttgtcgttccctccagaatatctttcagtatctgttcagcggttactctgtttacacgtgcttttccattcagctggatacggtgtgcttccacatcgataaaaacatcctccacatccaccggaagtacataatttctccccctcagatatgccagtgcctgtaccatccttgccagtgcaatcgttcctcttgggctgattccaagctcgatcagggaatgttttcttgttgcattgaccagcttcccgatatactgatagaccgcatcatgaatataaattttatggatttcatcctgaaggtgcagaagttgtgctccattcatcaccggttctaccagattcagcggatctgtcgtaatcttgcctttcacgatctccagttcatatttcatatccggatatccgatgtgcatacagatcataaaacgatccagctgtgactggggaagcatggatgttcccgcacttcccaccggattctgggttgcaataaccacaaacggtttgggcaactcatgggtaatctgatccaccgttactttcccttcctccatgacttccagaagtgccgcctgcgtcttcggtgaagtacggttgatctcatccgccagaagcaggttacacataacagcccccggctgatactcaaaggtaccggtcgctttctgatataatgaaaatccggtcacatctcccggcagtacatccggcgtgaactgaatacggttctgctcgagatgcagcgctttggaaaaagccagtgccagcgtggtctttcccactcccggcacatcctcgatcagaatatgtcctcctgcaagaatcgcagtcatcacttttatgatacagtcatcctttccgatgaccgcttttttaatctcctgtatcgcccggatcgccggactttctgtctgcttcatcctcttctcccctttttatactcttgaagtttcctgtttctttcattttgttgcaggccgcttttactgttcccctgtcacacgcatctgcagccggcttgccggaagttcatctctggcttctgtctctgccagaagctgtgtttcactgtctgctgtcacacaatacagaccgataccggatccttcttccgcctcgctgctgatccgcagctcatacgtttttcctttttccaccgaaactttctcgccgatgaaagaatacagcgccgaattggtcgtaaaaccgtccgtctctttttctccctgatataccacatccccggtttctttgtcaatcagttccactgtaagtgtatcagaaatgctcttctctccggtatagacacggatcttcagattcgacagtacacttccctccatcgtcagatcctggctcaccgaagagctttcatccacctgaatgatattgtccggttccagatcctgacggctgttatccagcagaacaattttcccctggaacatgccaagcgcacagatcgatgccgggatcacaaatgcaaacacactgaccagaaatgccgcacggatctgccataccagcccttttgcgatctcggttcctttccggatatggtatttcggatgcccgaagaccacatagaccagaagcaccacccacatcgcagagcagagcattttttcatcatggaacatatacagatcccacattctcaccgcaaactgctgtcccggaaggatgtatttcaggattccgtaattcattatctgctcatctaccaggttctggctacagaaaatatacagtgcaacgatcagcacatttgtcaccatcaccagcagattgccgttttcattcatgaaaatatttaacaccagaaacggcaccagcatcagcagccactgcgggttccaggaagagaatccgaagattgcaaaactcattcccacacagaagaaaatgccccaggaaaacatttcccggttgtcttttgtctttttctgatacgcccacaccagcatgaaagctgctgttaccgccacaagattgattccgtcaaagaagccaatggtgaatggtttctgcacaaatttcaaaacgccaaatcccagaacattgcgcttgaaataaatatttccgatattcggcagcacttcgatcatcaatggaacagccataaccactacatatttgatcaggttgcggatctttttctcccgtaaaaccagcagtaccaggaagaacagcagtgcgtgatatttgaatgttgccgcaacaccgaaagacagtgcaaacttccataagccgcctctcacataaaaatacaggcccagtaccatgaaaaatacggtaaagatatcatactggctgaatataaactggctgaacaccccgatcggaaataccagaaatgcaaacttacaaagctttgctttcttttctccgaaccctgcttccacaccgatctggtagatcagatgggaagtcgcataatacagaagcaccggaagcagtttataccacatattattgataaaactgtttgtcagcatcgcctgtggcgcatgaccggtcagatacaacggcaaattccagatcgcatatgccagaaaagtactcggcagataattggcataatatccatgggattgttcatagcttgccttataaaaatctgtaaagtgttcatacatcaaaaatgacctgtttcccgtcagcatcagatctccataggcacaagtaaaaaacagaaaaatcaggatcagcgctgagatcacccagtccagcttattgagttcttctgcatcccacaatttcatttccttccagctttctttcatccgcatacagaaccctgttttacgctttgccagttttgctttcattttcactgtcctctttctcttcaaaattcagtctttcttcctctactaccagcggacgatccagcacacgggtattaatgctcagcacatattctcccaacagaccgatgaaaaacagctgcgttgctcccagaaagaacattccgatgagtaacggtgccatgcctgcggtaaatcgatcccagtacagcattttcaggataaaataaataatccctgccaccacactgacacctcccacaaaaaatccaagaaacgtcgccatccggagaaccactttcgaatacgaagtaatcccgatcatcgcataatcgtacagactgtaaaaattatttttgctctttcccgcttttctcttctgctgttcataaggaatcgccgtataatcaaatcccagttctgcaatgattcctctcagatatggcatcggatcatgaagatctctcaccacatccacaaatgctttatcatatagtccaaagccagtaaattgttcgatatgatcaatatctgttattttccggatcagtttataatagcatccacggatccagtacatcatccggttttctttgctcgcttttttgatgccaatgacaattttggatcctttctcccactctcttacgaactttacgatcatatccaccggatcctggaagtccgcgcacatccgaatcacacagtccccggttgcctgtttcagtccgtagaccggagagcgtaactgaccgaagtttctgacattaaagattgcctttatatttttattctttgcgcacagttcccgcagatacatccgcgttctgtccttggaatggttgtcgataaacaggatctcataccgatattccggaagttctgtctccatcactgcgacaatggattctgccagcggttttacattcccctcttcattgtatgtaggtatcaccacagagattttctttttcatttgtctttctccttcatccagcggaccatctcccggattccgctggaaaattcatacgccggttcaaaaccggtatcatttttcagactcgatatatccgcgcacaggtgcatcaccggctgtacaccataggactttttcccgatccccggagtagctttcggatttgccacatcccggatctggtaaatatattcatacagccgtctcgcctttccactccccacacagtagatcgaaccgtctcttcctttttccccgatcagataaaaagcccgtcctgcatctttgctgtacagatagtcccattcctgttcccccggggtgaatgctgtttcttcttctgcaaggaactgatgaagtgccgtcattaccatggtactttctttatcatagattccatatacgctgaagatccgcggccagatccattcgattccaagctctttgcataaaagtttcgagagtcttcccgctgccagtttgcttaccccatacggagttgtcggatgttccggcgcatcagggccgatcatttcccgatccaacggtccatattccgcctgggaacccgctccgatgaatcgtttacagccaagctttgcagctgcctctaccgcatccagggtataatcaatgttcttactctgtagcctggtacttttatttcttgccgcaccggtatacccccaggcaatatggtaaaacgtatcaaaagatcctgtcactttttccggcagtgctgccagttcttccagactgcattccaccagttccagatgcggatcttccggcagacgatcttttcttgccgtatccttgcggatcaccgcacatacagagattccatgtttcaggcattcctcaataagcgcttctccgatcatactggtcgctcctgtcacgatcactctttccataatacgccttcctcctccatctcttctctcgaaagaaacggatacatatcttccagtgatgccgacaccatggttccatccggaagctgtctggatgccagtttcggctccgtcttctggagtttcgacacaaaaacctgacagatcacaggtgccggaacttccatgaccgcccgcagatcctcttccagtgtcgcactgtttctgcattctttataagcaaatccatacgccggtgccagccgggaaagatccgggaagctgagatccccgctctcctcacccacacctaccagatgaccgccaaaataagccgtctgggtctgacggatggaatggtatccttcgttattgatcacaaagatccggatcggcaggttatggtgccggatggtctgtaactcctgcagattcatctgcatacacccttccccgttcacacagattacttcttttttcccggatccaacgcatacaccaatcgccgccgggagcccgtaacccatcgatgcagtcacggcattggtgtaaaatctctgaccttttttcagatagattgcctgacttcccgccacacgtgaggttcccacactgaccaggatctgttccccttccggaagcacttttgacaaactgtcataaaatgcataaatatttgttcgtcccggttccggttctttgtatttttcttccgtcactaccggatatttttccctccagtgacggcacttctctctccaggaggattctttctcatctgcaaaccaggggtgtgcacggctacaccctgcttcttcgagcatgtggatacacttttcgatcagctcttttgcatctgccaccaccggaagatccacgtgaagtgtctcttttttcagttcctccccgtcgatatcattgagaatcgtatacgcatgtgccgcccatttttcataggcaaatccggtctgtaaaaaactctgtctgcttccgatggaaaataatacatcacaggtctgcactgcaaagtttcccggacgatttcccgttcctccgtttcttcccacatacagcggatgtgcggattccatcagatcgatactgctcattccggtcactaccgggatcccaagcagctccaccagcctttgaaagctgtcatatgcacctgccagtcgaatcccatgacctgcaaagatcaccggacgcactgcctgtttcagtttttccagaatctttttcaccatctcttctgtcaccggagccggaagttctttctcatcctctttcggatcgtacgctctcagatcatcggtttctatgatggcactctgtatattcagcggaagatccagccagcacggtcccggacgacccgtttttgccagatagatcgcccgctccagatgataccggatcgtaagcggatccgtcaccatgacggcatattttgtcatgggttctacggacggcgtgatgtcatattcctgcactcccatcgtgcggatctttaaaccgctgtggcgcaccgtggtatcatatcgcacctgcccggacaggacaagcatcgggatggaatccatccacgcacacaaggcccccgtaacggcattcgtcgcacccggaccggaagtcacacagaccgccgccatccggttgtctaccctcgcataagcttctgccgccatcgctgccgcctgttcatgatgctggtagaggcaggtcagccccgggtgatgtcccagagaatcgtttagatgcattgcgccgccgcccgtcactgtaaatacctggcagatcccttcctgtgccagacgatccgcaatataatcagacactttctgcttcatatcctctacttccttccatcccatttattctcgcagaccatgaattttccggaagcctgaatcgggatctcgtccacataagtgatccggatctccgcttcctctccaagataatgccggtaagcagcaatcagatcctcttccaccagttttttccggtctgcgttgaccagcagttcatactctttctgtccccactggatgcattttgcctgatagaccacaccctcaaactttaacagcgtgttcataaatacatggatcgacagcggctcgcccatacaattatacatcagagaaccgcggcggccgtagatttccacatattttccatgcatccgccctttttcatcctgatacatccgcataattcccgtatctccggtgtcgtaacgcaccatcgggaaggttttgttataataatctgtaactaccagccgtcccagttctcccggttctgccggctcatcactgttcatcttcagcacttccgggtagaagttatacaggtcgatcgtatattccctatcctcgcccagctgaattgcgataaaaccgttttcattatttccataagaacgcaccggagaatatccgaatatttcttttgtcagttcataggttgcatccggcagtgcctcacccatggaaaataccatctctaccttccacttactgatatctcttcccgtccgtcggatataaccggtcaatgcagtcagtgcactcgaataggtcaccagtacctggatcttcttttcctcgatatctttacagatcttttccagagaatcatctcccatgttggagatatccaccatgaccagattatttttgaaagatttccacatacttatggtatttttcccctttatccacgcgcggaattccccacgcttcattcccagacggaaaccgttcagttccatacaggaaataaagttcatattgacccggttcatcttgtcaccgtcacacagaacggtaaatggcgttccggtagaaccactggtactcagccggtacagattaccctgttctttgctgttctccaccagcacttcctcataatgctcaagaaaatctcccttggtcatcaccgggaaatcttccagttttgtccattccggatgttttttataatacggagaatgtttttttacatagtccagaagcagatcgatcctccgctccatatattccggcgtcacaccttccacgatctctcttttattgacttcttttaattttttcagcctaccgccttttgcagcatccagaagattgaacaccactcttctaagaacttcacctgtctgcatcttttcattctccttctttcttcgccggttttgccttccagatccccagtgtgatcactgccacaacccgaagcgtatttgctcccaggcatgcccaggcaaatccgatcatcccataattttttgctgccagcaccgatgcggtcagcagaatcacgaaatgtgcaagctgtatccatagctgccatttttcatccgtaaatgttaaaacaagtataaataaaaatgcggaaaacaatcccagcacctgtgccagattgaccaccgtgaccagtcctttgatggacggaaacaggtcatggtaaaacagccagacaaagagcggtgttcccacctggcagccaaggaaaaagacacctgccacaccgcctcccgcaagcactgcctttccaaactgacttctgtttaacagttctctgcgttttgtcagataagaaatcacgatcgtattgatcggtgcgatcagaagcaccagggtctttccgatcagggaaatcacatagtagatcgttacctgttcgttgccaagaatctgctttatcaccagacgatccatattcattgtggtgtttgtgatcaggtacgacaatgtcaggaaaaatcccctctccagcgccacaaaaaaatgtccgctccgccgaaaaaacttatgaaatacagatcctgtaactgccacataacaaagagcagctacctcaccaatcagatagatccacaaccactgatctgtaatacggtaaatcacaaatcccgcaagatatccgataccgatcagcagataataaataaaatacctctgataattcagattcagtcgatattccacatccccgtagtaccggaaaaccgtcagcagaaacagggcaaacaccccgatccccacagggattccgctgatactgtctcttgacataaaaagtgccacaccgcttcccagtatgccaaacagcaacaggatccagtcgtagtctccattggttacctcatgtgatcttcgcaccaccagacggctggtatttaacgcctgtccgacagacggacagataatcgcgaccaaccctgtaatatacaaaagttctcccagctgctttgctcccatataacggttgagcaacggcgtaatgatcagctgcaaaacgccgttcataaagatcagcccgcccatggtatacaaggtgtttgcagcgatccgttttttctgttctttcttttccacctgtttctccctattatccgcagaaaccggtctgattcttatacttttcgcaccggttttctatgtatttgcgctttccggaagcaagcaccgggatctcatccaccagttccaccctgattctggcttcttcacccagatacgggcggatccgtccgagaatttcttcctgattcatcttctgcggatctccgtttaaccagatggtatagtctttcacatcttcctggataaaacgatactgttttaccccttcgatatcccacagattattggtaataatatacggtgttaccgcctttccttcacagtcgtagatcagatcgcttcgacgtccgtaaagttcatccagatacagcctgtatctgccgtttttctcttttctggttgccaccgccgtatccccgttatcgtagcggagaatcggaaacgcataattaaacagatccgtgatcacgattcttccaagttctcccggctctgccggttcatcggaatccatcttcaggatttcataataatacgtttctgtgtcgatccggtacccctcattatcttcattctgcaatcccataattccgttttcttcattggaataccaggcacgtaccgggcagtcaaactgtttttccagtgtccggcgcaccggttccggcatcgtctcagaaatcggaataatcgctttcaccttgcagcggctacaatcttttcctgttttctgaatataattgctcagttccccaagtgctgacgaatagccgacgagacattttacttttttcttctcgatcacccggaacatcttttccagtgcctgctcatccatccgggaactgtccatcatgatcagattttcctgaaaaagctgaaatttacttttctttacattattgacccacacacggataaaagcctctttcataccgatataatatccggctgctgctcccaggaatataccacccgccgtgttgtgacggattttgtcccggttctggatcatgcgaaggggagttccggtagaaccactcgtacacatcaccctgttatccggtgcatctttataggttgtcgaaaggaacttctcataattctgtcgaaacgtatctttgttgactaccggaagatctgtcagttcaatatcttccggataatccttatagaattctgttgtcttcaccgcatgggcgatcagtgcccgaatccgctcttcggtctcccgaatcgatgttccctctttccacgcccgctgaatctgatcataatatgttcttatctgttttcctttcagactgtccagcagccagaaaccaaaccatctcagtttttcgtccagtatcatacttcttcctttctgtaatccgccgcagctttccagtttttcatattatgtcaactcgcggttatcccctgttccagagctcattcctgtgcctttagctacgcgttttcaaatattattccagtgcttccttgatcgcatctgccattgcatccagcatcacatctgtcatccccggatagacaccgatccagaacgtatccgtcatgatccggtctgtattttccagacttcctgctacacgatagccttttcctgtcgcacgcatctggtcaaagcagggatgcttgatcagatttcctgcaaaaagcatacgggtctgtacacctttttcttcgatcttttgtaccagttgatttctgtccacgccttccctgcaggtgatcaggaatccaaaccagctcggctcggaatcctcacatgcttccggaaggatcagtttgtcttcggttcctttcaatgcttctttcagataattgaaattatgaattctgcgttctacaaaggacgggaacttgcgcagttgggcacatcccacagccgcctgcatatccgttgctttcaggttatatccgaaatgcgaatatacatatttatgatcatatcccaacggcagttccccgtactggcggtcaaaacgatggccacacagattatcctgtccgggtgcacacacgcagtctcttccccagtcacggaaagaacgcacgatcttatgaagcagcggattctttgtatagacggctccgccctctcccattgtcatatgatgtggcggataaaaactggaggttccgatatctccgatggttccggtcagtctgctctctccgtcgatcgtataacgggaacccagcgcatcgcagttatcctcgatcagccacagattgtgacggtcacagaaatcttttaccgctttcagatcaaaagggttgcccagggtatgtgcaagcatcactgcttttgttttttctgaaactgcctgttccagaagattgggatcaatattatactgcgggattgccacatccacaaacaccggtactgctccatactggatcaccggagctacggttgtaggaaatcctgctgccaccgtgatcacttcatctcccggaagaatctgtctctcctttaacagtggagaagtcagtgccataaatgccagcagatttgcagaagatccggaattaaccagcgaacagtattttacccccagatattttgcgaattccgattcaaattcttttgtaaaccgaccggaagtcagccagaattccagagaactatctaccagatttaccatctcatccccatcgtacacccgggacgcatacgggatccggtctcctttttcatacgtttttttctgattgtgatatttttcgcagtattcctttgtcatctccagaatctgttctctcgcctgctgttctgtcatttcttcaaacatgttttctgctccttttttatattcgtttcctttttatattttccggtaaaactgaaattcttcctcatagtacgggaaggtctgatccagctcatacgtttcactaaaccactggtaagtctccggatcattccgctcccagataggcagtgatgaccgactggtaaatacatacggtgcatccgcctctgtcagctgttcctgtaactcctgtaaggattccgggatcaccgccatatcgctaaaatccatggtaaagcactgggtattccagtgaagcagactgtagatctctgccacatttaacccgaaaccatgcgtgttttccggaaccacttctgcaatttcctgtacaaatgcttccagctcgcccacattatgataattttctttgatcttactgttctgggaaaactgcagcaccgttcctgtactcatggcaagcactgcggctgcacaggcaagtcccagtgtaccgttcacgactcccgccagatctatctcttcccagtgtttccattttctttccttaacaaatgtcattcccctctgccccagatatgccagcaggatcactgccgacaggctgacgcagtccaggttatggtaggatggtcggttgacataatatgtaattcttcccagtgcactgatactcaggaaaaagatcagctgcacctgtccgtcatttttctgtttcgcataaaaccaggtactgattcccattactgtcccgatcagaaacagcgcgatcacacccatataggcactcggatacatcggcagatccagatgcaggatatccaccatataagaatccgacaataacggaattaggaattctcccagtgtatttgccggactgtgtttggacagattatagagattcacgattctataggctccgaaaaatgatgcagccacacagaccgcgtgtaccagtacggttcggatcagaagaccgatccgccattctcccccggcaagacaccgggaaacaaaaagcgccatccatgccaccgcaaggatcactccggtttccgtgttccacagaatcgccagcagacagatcagataaccggccagaccggtccacacattccaccactgttttttcattaaaatcgccgcatacaacagaaggatcatcggaaagatcatccgatgcggccacacctgccagtaataaccgccccgcatcccgagcaccggaaatgccgtggcaactgcgccaagtgcccggagaatccggctttccaccgtcagttccagcaccagaaatgcacagacgtgtgccagtgttccaagtgccgcgatcatcagcacgaacatccggaaatctccgcccaccagtttcatcggtatcttaaataacagcccataatgcccatagatactcgtcattgtatctgtataaggcaagccctgatatacattgtatacagagttataatacgcgtgagcgtgaaaatgatcccccgcctccgcgcgcccgaaaatattcggcgtatccatgcaataaaatatcagaatcgtcaaaactgcatatataagccataccatccagtcattcttttcttctctgatctgtatgtttgcatacacccggaaaaatacaaccagttctgccagaaacagcagaatcatcagtggcaacggttgtgtgtgccagccatatttttccgatacacttcctacctggccggtttccatgaatactccgatggcgtaaaagatcatctgcgataaaatcaatactgcaaataccagttcattgacttttttattttttctgcttagccatgtgcctgtcccccaccgttctgtcagaagcatacctcctagaaataccaggcagaatattaataacatggcagcataaacaagcagatttccattgcccagtcgattgatgtgatccgacagttccgatatcagaaaagatgctccaaagaatcctgctgacaccagcaaagctgccgccccgcacagaatctttcgattattattcatatttttcttcctttttcacatttatccttttctattttctttcctgtaaagtaaaatattttcggatctgttcatccgtaaatgcttccatatcttttccctcaagccatgcctgataccacacggctgtctctttcactgcctgcgccacctgccagtgcggtttccagccaaatgccgtacggatcttcgagcagtccagtttcaggaaattcgcctcgtgcggccctccctgatacagattttcccacgctgcctcccctccccaggaattacagaacaggtccgccagctgaccggtggtgatacagtcctcatctcccggtccaacgttataggaaccggcacacgctggattttcatactgtgcctgcgcgatcatcagatacgcaccaagcggttccagcacatgctggtacggtcttgtggaatgtggattccgtaccgctattttttccccttttgcgactgcccgcacgcagtccgggatgatccggtccggagcgaaatcgccgccgccgatcacattgcccgctctcgccgtggacaccgccacaccggcttcttttaagaaggatttttcatagctgtgggtcaccagttcggaacaggacttgctgttggaatagggatcgtacccatccaactcatcgatttcccgatagccccactcccactcgttgtttttatagactttatccgttgtcacattcaggaatgattttacactttttgtctggcgcaccgcttccagaatatttactgttcccattacatttgtctcatacgttcccaccggatctttatacgattcccgcacgatcggctgcgctgccagatgaaacacgatctccggctgtgcttcctgcatggtacggatcagtttttcccggtcgcggatatctccgatcacggagtgcatatttttttccagatgtaaggtatcaaaaagtttcgcctccaccggtgcttccagcgcatatccggtcacctcggctcccgaaagaatcaggatccgggaaagccaggatcccttgaatccggtatgtccggtgagaaatactttttttcctttaaaaaatgccaggttattcatgtctcttactcccacactttccatggagcatttccgcttctccacatttcttccagtttcttcttctcattcattgtatccatgcactgccagaacccattatgccgatatgcatccagctgtcctcttctggctgcctcttccagaggatatttctcaaatacagtcgcgtctccttcgatcagatccaggatctccggttccagtaccataaatccggcattgatccatccgctgtcttcctgttttttttctttgaagtttgtgatttctccatcttcccgcagatccagcgcaccgaatcgtcccattggctgtacggaagtcaatgttgccatgcgcccgccttcctgatggaattttaacagttcagcaatgttgatatctgccacaccgtccccataggtcaggaagaatggttctccgttcaggtgttctttaacccgtttgattcttccgccggtcattgtgtttaatccggtatctaccagggttactttccatggttcggagatgttgttgtgcacagtcattttattttcccgggtaaaatcaaatgtcacgtcgcagctgtgcagataatagtctgcaaaccattctttgatcatatgttgtttgtatccacagcagatcacgaattcgttgtatccataatgggaataaagtttcatgatatgccagagaatcggtttgtcaccgatttctaccatgggctttggtttcagtacactttcttcgctgatgcgggtgccgaaaccgcctgcaagtattactactttcatgttttttctccttgtttgttccgattgaagggcataaaaagccttattttatttattgtatcaaaaagggggcttatttacaagtaggagggaaatacatccggacgcccggagaagccggatgacaggacagtcagaaggtggcaacgtgggcagagtcgttttgagctagccaccaactccgactaatattcacgagtgtcagctgacactcgcgaaaatctacgtaggtgtcggatctcaaaatcgcctctaaccgcccacaaagtgttgctcgcctttctgactgtcctgtcatccggcttctccgggctgtgtattggaacacgaaaaggtacgctacatggtaatataataataaaatttctttcctcaaatgtaactgttcagtaccttcacagttacgagccaaaatgcataaaaaatcaccttcggtgatggcattttgacttgtatgtctctggattttgacatattcatgtcaaaacacctcgcgggacaatggctactgaatagttaccctcaaataaacaaatcgaccatcgaaagataaattttcagtgatcgacttgtaaaagtatttttgtttttactttagcagacaattttgtccaagataccttttaattgagcgatggctacgccatagttggtcattgccacgccctggttttttgcctgttggatgcggtggaggacgtatttgcggttgaacatgcaggcgccgcactggatgatcaggtcatatggggtcaggtctttggggtagtcggtgccgcttacgacggttactttcagggtttcgccgtattttttcttcagcatccgcgggatcttttctctgccgatgtcttctttcagtggtgcatgggtgcagcattcggcgatcaggacgcgggagttagcggacagattcatcaattttttagctccctctttgtagtaatccaggtcgcctttgtagtcggcaaagaggacggaaaaggaggtcagcaggctttctgcaggtttgtgttcgtagacataatcgaagacctgggagtcagtgatgatcagttttgggggatttttcagctggtccatggcttccacaagtttgtcggtggtggcacttaaaacaatgcattttttatccagcagttcccgcatcgtctgtacctgtgggaggatcaggcgacctttgggtgcctggatgtcctggggcattaccaggaggacaacctctccctcggataccagatccccggtgatcgtccggccgccgaagccttcgggaaccatacggatcatccactctttcagttctgcgattcccgcaccggtttttgcgctcacgatgcagactttctctttcgtctgttctctgagtttttctgcaaattcctgattttcttcatctgaacgaagatcgcttttacttaccaccggaatcaccggtgtctttttttcctgaaaataccgaaaccactccagttccttttccatgtcttcggatgcaaatactatcagtgccagttccgttttctgtgcagccagcgccgtcttttccatccgcatggctcccagttctccctcatcgtcaaatcccgccgtatcgatcaatacgcacggaccaagcggtgcgatctccatcgccttgtagaccggatcggtggtggttccctttacgtctgccacgatggagacagactgtccggaaaatgcattgataaaggcagactttccgctgtttgtttttccaaatatacctatatgaagccggttgccggaaggcgtttcctgtaatgttgtacccatataatctcctcccttgtttttatgtaaaccaattctattctaatcatctgagttttactcattgtttccgtaacctaacagacacaacagacaacccctgcgcctttgcaggtgttgtccgctgtgtcacttctttcgactgtatttccctcttgtctcagtactccaacagtcgctttttattgtcagaaccgaaaatctctctgtccgttttcgatatcccgcagatgctcttctgcgactttacggactttttcatttggaatattgtccagttctttttcgatcagtttcataccgatttcttttgtctttggtgaagcataatcctggagatactccatcaatgtcatcagtgcattcggatgacaacagttgaggatctgtttgctcttgcacagggacataaaacggtcgccggttcttccggcgcggtagcaggcagtacagaaactcgggatatctcccatctccattaaccaccgtacgatctcatccagtgtcctctggtcactgacatcaaactgtgcggaagtcacttcatcttccgtctccggtgtatcgtatccaccaacactcgtctttgacgcaccactgatctgagagacacccaacggaagtactttttcacgaactgcctgactctctctggtagagatgatcataccggtatacggcactgcgatacggatcagcgcgcagatttttgcaaaaatgtcatcactgatactgttatcaaataccgttggatcgatatcgtccgcatgtttgatacgtggtacactgatcgtatgcggtcccacaccgtgtacagcttccagatgttctgcgtgcatcaaaagccccgcaaattcataacgataaagctccagtccaaacagcacaccaagacccacatcatcgataccaccttccatcgcacgatccatggcttcggtatgatatgcatagttgtgtttcggtcccttcggatgcagttcttcgtagctctttttgtgatatgtttcctggaacagaatataagttccgattccggcttcttttaattttcgataattttccacggtggtcgccgcaatatttacgttcacacggcggatggctccgtttttatgtttgatactgtaaatcgttttgatagattccagaatatattcgatcggattgttttccggatcttctcctgcctcaatcgccagtcgtttatgtcccatatcctgcagagctgtcacttcttttacaatctcttcctgggtcagttttttccgggcgatatgtgtattctttttatgatacggacagtatacacagccgttgatacagtaattggacagatacaacggtgcaaaaagcacgatccggtttccgtaaaattcttttttaatctctaccgcaagttcatacatttcctgaatcttgtccggcatctcacacgccagcagcacagaagcctctctgtgtgtcaggcctttacattcctttgctttcgcaaggatctggtcgatcagttctatattatctttatttgcatctgcataagccagggtctctctgatctcttcatctgagataaattcctcggcttttaacgatttcggattatacataacgtctctcttcctttctttttggtcaggctgccgggtcttctgtgattccattcggatcccgcagacagatttccgcaatcttcccaattagtatttcttgtttttcatcggcacattgcactgtctccgcgatctgtcacacactgataaccaatcgcagctatgcgccgttccagacagccgcggcactctgccgcttcttcgcccgtacagattttattgtcatacagctggtatttgtccctcacctgaatcggtgacaggtttggcatcaccacgttggctcctgccagaatacccttttctcttcccatcggatggatcgttccgagtgcagtggtggatggcaacagtaccatcggatgaatcagccggatgattgccagaagccgtaaggtatcttccagcgttcctgccttttcttctgcaaagggggtatcctgatggggaataaacggtccgattcccaccatctccggttggagttctttgataaacaccagatcctcatataaggtatccagcgtctgtcccggcgatcctaccataaaaccacaccctgtctgatatccgatctccttcagttccctcagacactgttttctgtgtgccagcgacatctgtgacggatgaagtttctgataatgcgcctcatctgctgtctcatgacgaagcagataccggtcagtccccgcgtcaaaatacgcctgatagcttgcccgttctttctctccgatcgataacgtcaccgcacagtccggatatcgtttcttgatttcttttgtgatcgtacagatccgctcatcggtataataaggatcttctcctccctggagtacaaaggtccgaaaacccagttcccatccgttttcgcagcacgaaagaatctgatccacggtcagccgatatctttgcactttttcattgccacagcggatcccacagtaatagcagttatttttacaataattggtaaattcgatcagccccctcaggtagatctcttttccataatatttcccggctgtcgctctcgcccgccggtacagttcctcgatcagttcctgatcggttgtcgtcagcagttcttccagctcctcacggctgatcatctgctcttgttcgatcttactcagtatgtctctgttcatgcatgtctcctatttcgagtaaactgcttttgccgagattccttccagtcttccgatcttgccggtcagggcattgatcgtatcctgtggcgcatccatcgcgatgctgatcacatggatctttctctcccggtagggaatccccattcttcctataatataacttccatattcatgaagcagctggttgagtttctcgacttcctgtggttcttccacgataattccaatcacggcaattctgttcatgttccactcactcccttatatctgcactttctgtgcctgcttcttttcaatacagagagcagaaaattctgctctctgtagctgtagtatctgtatgttattccacatcaaacttttccagactctccagtcttgactgatatttggagtcggaagattctgtaaaggacgcttcacctttcatcttttccagcgctgctgctgctttctttaccacctgcagcgtacctgctccggccacacatcctccaggacatgccattccttccagcagatagccattgtacttaccggctttcgccatctggagcatcttcttgcagttctgcagaccttctgcattgaccactttgacttcccgttccggatcgatccgttttaccgcatgtacgacagcctgtgcaacccctccgctgactgcaaaaccgcgtccatctgcacttgcacggaataaaggttcgccttccggaatatccttccagtccacacctttcgcatcaaacattccggcaacttcctcaaatgtcaatacaaaatccacataactgcggatactcttccggcttgcctccagttttttcgctgcacacggaccaacaaagacgatcttgcagtccggttctttctgtttgatcagtcgcgcagtcagaaccatcggcgtcagcgccatggaaatgcattttgcctgttccgggaacagttttttcgccatcatagaccaggacgggcaacaggatgttgccatgaacggcagcttttccggaacttcttccagaaaatcctttgcttcttccaccgtacacagatcagctccgatcgcaacttctctcacatcggtaaatcccagtgcctgaaaagcgccacggatctttgtatttttcatatcctggaactgacctgcgatcgccggtgcaagaatcgcataaaccggtgtctcgctctttatcgccatgatcgtctgaaaaatctgccccttatccacaatggcactgaacggacagcttaccagacactgaccgcaggatacacatttctcctgatcgatctccgctcttccatattcatcggaaccaatcgcattcattccgcatgcttttgtacatggacgctcctgtttgatgatcgcattatacggacaggcttccacgcactttccacatttgatacatgaagactcatcaatatgagatcttccaccttccatatggacagccttcttcggacagacctccacgcatggatgttccagacagccctgacatccttctgttgtcatgactctcttctccggacaggcattgcaggcgaatttgatcacattgataagcggcggttcgtaatatttttcttctataatactgggttccacacctttggagattggcgcatgctccgtgatttttctcagcgacattcccattgccacacgcagacgctcaccaacgactgcccgctccagaaaaatactgtctctgtaagttgcaacctctcccgggatgatcttatatggaagttcttccagtacctcctccggagattgctcttcgtatgccatacgggcaatctccgtgaatattttgtgtctgatttctgtcttggatgaatacagtcctctcatttttcctcctgattttccgttatacatttttcatagtttttctttttgatagtactttttaaaaatgataacatccgctctgtcagaattcaacagttccgatcgcatctacctatgcaaatacggaatagttccaggagttatatgattttaaaatttattcataactttcgttatgtaacagttcatgttctttgccttttaataatccggcgtacagttcctgaaccagcgggttctcatcggatttcttgatgatcgttgtattatctgcgttgtacagacctttcgcacggagtgattttgttctgtcaccggctctggtcggctgtccgcctcccatgatacagccacgacgacaggccatgatttcgatcagatgatattctttttctccgttctttacctgatccataacttttctcgcattggcaagaccactggctacacagatcttgatttcggttccctgataatctacagagaactctttgataccttcttctccacggacaccgctttctgcgatcgcatgcatcgcttccttgctgtggtcattggtcagacgacgaagaaccgcctcagtcacaccaccggttacaccgaagatcacaccgccgccggaaccaaatccaaacggcatatcacaggcttccggttcgagaagcgagaatttgataccaaagttgtcgatcatacgaagcagctctgtggttgtgataacgatatctgtatcctgttctcccttggtaaagctgtttggacgaacagcttccgccttcttcgcagtacatggcatgatggaaaccataacagttttcttccccttcgcatgctccggatcacggaaatactctttgatgactgcggaaagcattccctgcggagaacggcaggtggacaggttcggaatataatctttgtactgatcggttacgaatttgacccatgccggacagcaggaagtcagtaacggaagtttttctccttttttgattctgtcaaggaactctgcactctcttccatgatcgtcagatccgcactgaaggaagtatcgtatacttcatcaaatcccatcaggtgcagggcattgacgatcttgcccatcacgcttcttcctttggtcagaccataatgatctcccactgcaacacggacagccggtgctacctgagctaccacgcgcacattcggatctgccagagcttcccacacttcatccatattggttcggatagaaatagctccggtcggacagaatactctacactgaccacagtttacacagtccgttgtggaaatcttccggtcaaacgccggcataaccatcgcttcggtaccacggaatgcaaatccaagagcaccgatactctgcagttcttcacaggcgcggacacagtttccacaaaggatacatttattcggatctctcaccagagacggggaactcatatccagttctctctgttctctcgtattctggaaccggacattttcaacccccagacgatgtgccagttcctgcagaacacattctccactctttacacaggtggtacagtcacggcagtgtgctgccagaagcagttccacgatgagttttctgtattttctgatacgtccggaattggtatggatcaccatgccgtctctcggctcttccgaacaggatgcaaacatctttcctctgtcatcttccacggtacacagacgacaggcaccaaatgtggaaagctcggagtggtaacacagtgtcgggatattgatacccgcctttcggatcactgacaggacatttttctcatccgtaaattcaacttttcttccatcgatgatcatatgactcataagacaccctccttcctacatttccacatatactgcattaaagttacagttatctttacaggcaccacacttgatacacagattattgtctatctgatgcggatgcttgatagctccggtaatcgctcccgccggacagttcttcgcacattttccacagccgatacagaactcggaattgatatggaactgacgcagagccgtacatacttttgcgtggcactttttatcacggatatgttcaacgtattcgtcgcggaaccggttcagggtactgatgaccggaagcggtgcactctttccaagaccacacagagccatgctctgtaccatgtgtgccagttcttccagctcatcgagatcggacatctcacccttgccgtctacgatccgctccaggatctccagcatacgtttggttccctctcggcacggaacacattttccacagctttcacgctgggtaaagttcataaagaaacgggctacttctaccatacaggtgttttcatccatgactaccagtccaccggatcccatgatggcatccagtttctttaccgaatcaaagtccagaggcgcatccagctgatccaggatcagacatccgccggacggtcctccgatctgtacgcccttgaaagcagcaccactcttgagtccgccgccgatatcataaataatatgacgaagcgttgttcccataggtacttcgatcaaaccggtattttcaatggcaccggtcagagagaatgtctttgttcctgggcttccctcggtaccgatggtacggaaccagtctgcaccttccagaatgatcttcggtacattggcatatgtttctacgttattcagcacggtcggtttttcccacagacctttttcaacggtacgcggtggttttacacgcggcatacctctgtttccttcgatggatgccgtcagagccgatccctcaccacatacaaaagcacctgcaccacggttgatatgcagatggaagttcacatccgaaccaaggatatgatcacctaacagaccatttgcctctgcctgttcgatcgccatgcgcagacgttttacggataatggatactctgcacgcacgtagatatatccgtcttctgcacctactgcataagcggcgatggtcataccttcgatcatcttatacggatcaccttccattacagagccatccatgaacgcacccggatcaccctcatcaccgttacacaccacatatcgtactttttctttctgacgggctacctgtgaccatttttttcctgcagggaatcccgcaccgccacgtccgcgaagtcctgattttgtaacttcttcgataacatcctgcggggtcatggagccaagtgctttggccaatgcctgatatccaccggctgcgatatattcgtcaatcgactctgcgtcgatctttccacagttttccagaacgatacgtgtctgctgattcaggaacggaatatcgtccggatgcggacagacggtctcatgatcacggtagaacagtctctctaccggctgtccttccaggatcgtgcgctccacgatctctttacagtcttccggctgtacatgtacatactgatagttatatggttcgatacgcatcagaggtcccagttcacacagaccctgacaaccggttttgatcacaccaatatgcggaatatctttctgcatctctacggtaacaccatcgatatcccgacacagaatttccatttcttcataaattttctgagcaccggatgcgatacagccggtaccggaacagacaagaacgcgacaggtatacgatttgatttcttcatttacctttgcctgtctgttcaacagatcttcacggcaatttatactcatacgctttctcctctcaattcatttaacagctcgatagctttttccggcgtcatcttaggatgtacttcatcattgaccgtcagagtcggcgccagtccacaggctcccagacaggatacggtctctacggtaaataacatatcatccgttgtgtgtttcttattactgagtcccagctctttcatcagagcttcttttaccggcatggattttcttacatggcaggcagttccgtcgcagactttgatcacatactttcctttcggttcaaaggaaaagttttcatagaatgttgccacgctgtaggcttttgcctctttgactccgatctctttcgccacataagtaagcagttctcccggcagataacgatattctgcttgaatatcctgcatgatcggaatcagggaagctgccttgcggccgtagtgttcgataatctcatccgttttctggtaataagattgatccagcatgtagtttcctcctttcacttcattgcccttttcttttttgatttcgataactttccgtacctgttcagtttcccctctgaacagttttgcgcaaaccgcagtttcaacctccatattgctgccgttcacttttgcattttatacagatgtcattatcactattatactttattttatcattttgcacaataaatattttattttagtgctatttgtcgttattttaacgaacttttctcatataacaatattttttatcaacatatcgtgtttcatctttctatgtcactacatctggtatacctgatgtgactacttaataacaaagaaaaggcctttttcctgccaattcaaaaagcgccattgctctctgtgatgttcttcacataaaagcaatgacgcctctttttcaggggcaaaataccttttgactgcagcatctgaaaccgcgctctgcccacacataacaggttgtgccgatggaataatacggctttccgtcttcgtaggcaaaatgataggtatttgccacacggatcggtccgtgattttcctcgctcgccggtgttacctgaaatttcccggtgagcacttccccgtctatcgcgctccctgtcacttcgaatgtatataattccacgaaagacggcatatatcttactttgtacacaccttctccgtcataaaatccgtccacagttactgtctcatgttttcctgtaaagattccttgaatttcataatctacaaatgggttcttatcagaatgaccttctacagtcacttccagaacatcccatttttccacctgtttttcataattgtatcttctcatattctttctcttttatttaaatttatgtttattttatttattttttgtttatattttaaacttttttcatttttattttcaactttttctgtaaatatgtgtttttgctcattgtccatagaactaagaacgtgcctcggtacatcctcgcggagcgtttcttactttacaggaaagcaatttcctgtaaagtaagaaaaaagttcagcttcccacacggaatctgaactttttcacttactgttctcttttatcttttcttaactgtttcaccatctacaaacacacaatttgtatacaacttacatttttcttttaccgggtgttctatttccttcaataacaactgtattgcccagtatgctctttctgtatgggggacacggatacttgtcatatcaatgcctccggtgagaaaacttggcagagcatcaataccgatcagactcacatcttccggaatacgaatattcaattcatgcattgccataatcgttcccatggaaacatgataactctccataatatatgcctgaggcagctttgctgtttttagatactctcgcatcatctgatgaacttcttctatactgcttcccgtattgatgatacgatcagaagcatctcccagccccttctgtttcatgatttcctgaaaacctctgcgccggctcagataattatacatcggtaatggattacacagatactgaatatctgtatttcctttcgccagaagttcgttcaccgcaagttctactccctgacggttatcgatcagaatcaccggatatttttcaatgtccggcgccgcatcgtaaatcaccagcggttttcggattccgtcaagcaacggactgttttcctgttttaattccgttccgaaaataattacacccgccacatcatccgcattacattcggcaatcatgcgggactgatcttcctccctgaaatctgcatacagtaatccaagcgaatatccatttgcttgcagatttttctcaaatacctgattcacatctgtccagagatccagctcagctccctgtatatttttcattccatttgtaattttgacaatcttgatctgctgtctttttctttgttccggctgtctcgaaaacattcccggcggcactaccccatgctcttccagctgtttcttacatgcgaggacttcctgccgtgtctgttcactcacgcccggttttccattcaatgccagagatacagtggatttagagatgccaagtgccctggcgatatctatggattttacattcatgtagaagccccctgtctgttcctcgtaactgttttaacaattcaatttgtaatggtttattttaaaccttttaaacattttatctcaaatccggtttctgcgcaaggatataataatcaaaattaatccactggaccaatttttgatatgtaacacagtaaaaacggactgctacagtttttattgatacagcaatccgttttctcacattttactctattctgttattcccagaaaatgtagcttcctggccccacagcatattctttttttccgattacaatctgcgccggaaccggtgttacaatctcataccgaatcgcaccgtctgtgtgcgtccaccgggaactgatctttccgtgtctggtctcaatcgatgctcccagccactccagctgatctcccggttttggctggatccacgctttttcaaatcccggatgttcctccaccacccggattcctgctgcctgttcatagatccagtctgccacggatccgtatgcgtagtggttaaatgaattcatatcggtactccagaactctccgttttccatgatgccgtcccaatgttcccagatcgttgttgcgccttttcccaccgcatacagccaggacggatattctttcctgcataacagcgtataggcaagatccgtatatccgtaattactcagtacatgcaggatatacggcgttccgacgaatccggtacgcatctggcagccatcgtttcgaatcatctgtgccagtgcatccgctgttttctgacagtcttctgccagtccaaactgaaccgccagaatatgttccgtctgtgtcccgtactccggatatgtgtttctgaaagtctccacgattttttcatgaagtgcctcgtacgtcttcacatcttccccgatcacacgtcctgcctttattacaagttctgtcgaatgtgcataaaatgcagacgcaataaaatcttctctgcttgatcccttatagcttccctgcggcgcatccagaccgagccagtcaccgaagtgttctccacctttccacagatatggggtgtttgtgtgatttgtcacataatctacccattttttcatactggcaaactgatcttttaagatctgcggattgccgtacgtctgatagatctgccacggacagatcgtcgccgcatctgcccaggcggcactggcatttccgccaaccagatagtccggaactacatgacctactgcaccgttctccatctgatccgctgccagatcgtgaagccatttcgtaaagaaccgctccacatcaaaattatagcttgcagttttggtaaatacctgtgcatccccggtccagccaagccgttcgtcacgctgcggacagtctgtcggcacatccaggaagttgcctctttgtccccagaagatattggagatcagctgattcagaaccggatccgaagtccgtatttcaccggtttttcggatgttggaatatactgcgattccccggaactgttccggcgttgctgctcccggaaattcgtccagcaaaaggtatcggaaaccaaagaacgtcagcgcaggatgccaggtctgtgttccctcgctgcagatataatttatctccgcttttgcacttctgtaatttgcattgtagaaatttccttctgcatccagaacttctccatgaaggatatggatcctgtcacctacatgagcgtccacggtaaactccacatatccggtgatttcctgcccgaaatcaacgaccatttctcctgccggtgtgcggaaaacagattttgctgtcaccacttcctgctcccggatctcttccccctcctgcggaatcagaatctcttttgaccatgcgaattcttttactgtattccactctttcgtcacaaaagtgtcatcacagaactccccgtcgtaaatctcactgaaacgaatcctgctttctccccatatccagctctggtccgttacgattacttcttcgcttccatccatgtatacaatatgcacttctccgagaatacctcccggacgccccattctttgcagcttgtcaggtgcgtcctgccatccgggcatcggggagcgaaaccaccctttcccaagtgttacggtaagttcatttttctttcccaccagatctgtaatgtcatattcctggtactgcaatcttttatcataagccgtccaccccggtgccagcacataatttccaactctttttccattcagatgtgcctcatacactcccagcgccgtcagatataaagtcgcacgttttaccttcttttccgtcttccatccctttcgaaaaaccggacacaccccaccggtatcttccgaagtccggatccattttgcgtgaaactccatagttctacctcccaccaactactgcatttatacagtttctcttataacttagtgtacaactttttcgccataacaggaatatctttcatgaccttttatccactttttccatctcttttacaaatttttcttccgtcatgtgcattcgcgaagctgcttctttcacggagagcaaaccatcctttataagacctgcatatgccttaatgaagccttccattcttccttcttctcttccgtcttcgatcatttcatctactgcctgacacatatcaatttcctcctcttctgatattgtaatcggtgtatttgttatcacttttattacctgcgccgccgcattttccatatacattcgagtattttctgttatatattcctttaatcgttctttatcttttgcatattttatacatcccagtacttcccggagactcgtctgaaacaactccagctgctcttttgtcaaacgtgcgggatcgatcagatgaattcgataatccggaatataattcagtatttttttatcatttacacgcagcatttcatgtaatgattccggtccgtcccataactccgtaccgaaatgaatcaccagcgtgattaccggcgtgagcttgtcttctttataaaaaccagataaatactctccacctgatcttttctttcctgtctttcggttttctgccgcaatatcacttacctgttttccatactgaagtgcatcataaatcatatttcttaccggcatcgcataatggatatctgtctgattttcaacaccaagcagaagatacaccgcctctccatcctctttcactacggttttcttcaatatatctctatatttttgtacagtttccgaatcctgatgtttctgatcaccaccctgcagaatcgccatttctgttgtgtcgatttccctcagtttttccggttgaatcatctgctgcccattgtacagtaaataattgaaggcatccgcgaaaaccctgttctccttcatgtaatttttggttatagtatccttttttcccaccaatctcctcctttttgtttttgcgcaggagatctttttcacataagatgaatgtcttctgattatctgtccatgaagcaatctcgctgctgatttttgaaaatataaaagcattgagacttctccgaatatggcatcaagatatgtttttagaaatgataattgaattcctcaatgaatggaaatagtatgctttgcagttatattaacacctgctgatttttttgtctatctcatttttcaagaggcgatggatttttttccaccgcctcttttcacacccttatttcagtactcttacctcaaacggtttcagcacaaccgtaccgctcactttttcacctgtatacagatccgtcatctcttctttgacctggatctcggcttctgcgtctttgtagttcagaacgaagcaatactcggtatcgtctttctttcttacagccagttcgcaggtttccgggatctccagttttgctttgtatggatctttcacacccagtttctccagaaatacttctgctgtttcttctgagaatgctgcgccgaagtaatatacggttccttctccgtaagtattcttgatcagtccaggttctcctgcataatagcagttctcgtatcttccaagaacttctgcatattcacccactgctgccagctgatcgttaaatacagcagcttccagcttcgtgccatcccagtcgatcacgatatctttgttgtccggggataccagtgtgtattccggaatatccacaccactcatctcggcaaatttgcccggcagtttgtccatgacacaacggccgtacatatctttgtatccgcttctgcagcccagaaccaggcagccgccattctttacatactcttccagtacggcttttctctcctctgagatcagtaccggatgcgggtagaacagtacgctatatggtttcaggtcttctgcggttacatcatcgcgcagatagatataatccatcggtgtatgggttctctgtgcagcttcgaagatgccaagctggctcttccactctactttttcatgccatacatccagctggctgtcccatgcgttgtcatagtctttcaggaaaccaacttttgcttcatacttggagcctgcaagctcagacagtttctggaatttctcatgaaccgatttgacttctgccagtctgcggttgtctcttccggaataatccaggataccatgccagtaaatctcggtaccgtaagtacaggttctccagcggaaatagctgacatagtctgcaccatgtgccacactctgcatggtccacagggtcatctgtcccggcttcggagtcggagctgccataccggtattccatccgttggctccggactgctgttccatgataccgaagtttttggataccgcacgaacctcagacaggttacggctccacatacgatctttcaggaagttatccttgttgtacgcatccagacaataagcaaagttcggataagaatcatatgtgatgaaatccagactctcgtttgtcattctctgattgtccaggttgccgaacagaccgttggtggtgataaaatcacccggtttgatgtatttgcggatgatatcgctctgcagttttgcgaatttgcatgcgctgtcagatacgaatctggtataatccaatacttcatgagggtttgtgttgttgctcagagtggttctcggcacatacacttcctcaaatctgttgtatgtctgattccagaagttcgttccccatgcttcgttcagtgcatcaatgcttccgtatttttccatcagaaatttgcggaaagcgatggtatcactctcagaatagaactcatttttctcacagttaagctcattatcaatctgccatccgatgattgccggatgttttgcataatgagatgcagatttttccacaataattctggtcagttcctgatatttcggagagttgtagttgtaatgtcttcttccgccatggcggtacagaacaccgtccatgtttgcattcagaacttccggatatttctcagtcagccaggccggcggcgtagccgtaggggtacaaaagatcactttcatacccatatcagcagctacatccagaaatctgtcaaagaaatcatagttgaatacaccttcgtaccgctcgatcttgctccatgcaaattctgcaattcggattacttcgatgccgttttccagcattcttttcaggtcgtcacgccagagactttcatcccagtgttccggataataacaggttcccaataccagtctttcgccatttataatctccatcgtgttcttctcctttatatatgtgcactatttacattaacagaatttttatcttgctccgctatggttttcatacaagcttctttaacacctgtgccagttccatgctgtttttcacatcctcatctatcacaaaatccaccagtcccacctgaggaatctcatggcagtcgcttccccgggttatgatcaggtgctctcttcccggttccttcagccatgcgtccagtttttcattatggttgtcatgtccggaattaaagtttctctccacaccatgcagatacttcggattctgtatctgacagtattcccggaaaggatgagcctgtatcaggacacatccgttttcctcacagatctcatataattcctgcagactgcagccacagatgtccatatgctcccggataaaatcctttgtcacgccgtataccagataatcctccggtccgcattccagacggatctccataccgaggatcaccctcagacctacacgttctccctcttcttttgccagctcatacccgcgaagataagtctgataatgctcctctgtcgtctcaccccacaggtgcatgatccccttgtcaaaatgattggtgatcacgattccgtcatatccggcctctttatatccatctaccagttcctttgctttaatcaccgcacacgggctgacttcacagtcatgtgcatgcatctctaatctcatacttttattttcctttctgttttttataacctgttatcgccggttctttatcttcagcacaatcgccctgattccaagaatcaccatccagatgatagattcgaaccaaaccattaccgcaagaaaaattccggtgtctgcatcccaaaacaaattgtcggatattgtcgtaatcaatcccagaaacgacagccagaacaggatcccggcaatccagatctgagaaattcccacgctgtaatgtgttcgaagaccagcgtataatattcccagtcccagaatcacaacgatcagcataagcatggtcgaaaaagaggacttccactcttctccacagattccctgtaactgaccgattccaatcgcagcaaatgccgccgcaccccatacatttggagtctcttttttattcttctgttccagataacgaatcagcaccttcgctgactctgcaccggatccggaataaatcttttgcagcgtcaggtacactttcctcttcaccggatatttttccagaagatcaatcagtccgctgacatatgcttcctgcagcatcactgccttgttttctctacggaagaagaacggttcatacagttccgtccgatttcttcgccttttatcttcaaggatcagttccagttcatacagcgaatcccggattgcccggcgggtctgctcctgcaatttttcctgttctctctgccagtccattttttttcgctgtgtttccgcttcccgtttccaccgttcccggcgctccgcttcttcaaacgcatcaaaccggaattcccagtgactgatatcctgatatgcctctgtattttttctctcctgttcaagagtttcttttttctgctgagcctccgacttctcattttcctgtagatcttctgcgtctttttctgtccttttccaggattcttctgttgcatcactctcttcaaaatccttgtcaaacgcttcttccgactcttcgctttcttcctgttcttcttcctctttccaccgtgtatcagattcacacgtttcttctgattcccattcagattccgtcttttctccgtctgaaaaccagtcatccgccgcatctgacgaccagttttccccccggccggtcagaagctgataggcttcctggatctggttaaattccttcggatgttcttccgggtgatattccttcgccagtcgtgcatacgcttcccgaatttctcttcttgtgcttcccggcatcagttgtaagatccggtatgctgtcagctggtccacgaatgatcatccccttcctttttccagaactcctcctcgtccgtttcttcattgtccggatcctgtgcttcctcttcgtcccacagatcccagtcatcccccgacgcatcgaattcttcctcaaacggatcataatattccagcacgctgaccgctttctccagataccttcggtatccctggatctgtcttggattctgtccatccagaaatttctcaaacgtacggatcatctgctgcacctgttctttctgttccggatatacttcctggtacaacgcttccagccgttccatcatctgctgattctccgacagatcccgcggatgcaccttcagtttctccagctcccggacacgttcttccagttccgcttccgggattttctgagaaataatgtgtgtttttaccacaccggtagacaccacccgggtatccaccaccagaatcccgttgatatcataagtaaaccggacatctaccgcctcttttcccttcggtctcggaggaaccgatatctcgatctttccaagaagcagattgtcctgtgcatatgtattttctccctgatgcacttccacgaccacataatcctgctgatccgatgccgtatagaatctgcgtactctcgaacacggcaataccgtatttcgattgatgatatttgccatatacgcccggtccgggtctgcttcatttatcgtggcaacgccaagagaaaatgggcagatatccgtcagaatataatctttaatctcctcttttctctctttcaccccacacacaagccccagtcccagtgcgatcagctcgtcgcagtttccctgcaccatgggtgctttatgaaacagatgtcggatatacttctggatcagcggcattttgctggatccgcctgccatcaccacaagatccacatcatggatcgtcattttcccgtctttcaatgctcttccgatgacctgacggatctcttttaacagatctttactctcctcaaacagccgatccattgtataggtactctcataaacccgatcgcccaccgtcgcatgcatcacgacctcttcctgctgggaaagcagctttttgcatcgttccgcctgtttgagaagcaccgcatattcctgcgcacacagctgctgccttcccattccgtgttcccgaagaaaatgctccgcgatcagccggtcaaaatcatccccgcccagccggttattgcctgctacggaaacaatttccaccatcgtatcaaaacaatctaccaatgacacatccagtgttccgccaccaaagtcaaaaaccagcatattctgttcttcatttgctgtaaaataagatgccagcgctgctgcacttggctcgttgatgattctttccacacagatccccgccagcactccggcacgttttaccgccaccctctgctcatcatgaaaatacgccggaaccgatatcaccgcttccccaatctcttcgcccagataattctgtgcatcttccacgattgaccggatcaccagactgctcaattcttccggcaaaaaacttttttctcccagcttccagctgcgcccggttcccatatctttcttaaaagaagaaactgtccgttccggatgggtgatcagccggtctttcgccggttgtcccacgatcagttttccgtcctccgtcatactgaccacactcggtgtaagataagagccgtatgcgttcggtatcaattccgctttcccgttgcggtaaacacaaccaagtgaattggttgttccaagatcaattcctataactgtcatcttctcttcccctcgtattaccaatactgcctgctgaatagttaccctgtatctttattattttcccgaactattcttttccacttgcggttcttccagaaatgcaaaaatccgtttccagtatcccctcagaatccgactttcggatccgtagatttcatgctttgtccccggtacaatgatcatagttcccgatgtcagtccccgtctggcaagttttactacaaaccgtacctgttccggctttgacaccagatgatcctctgccgactggaagatcagcaccggtgcctggatcttcttccacgctttccgctgcagatacctgttcagccgacccgcctgatacagccagctgtaggatgccccatttgtctgaaacaacggttctttctcttttttatcctgataatattcaaaccgcaccctgcaggtagaagaactgttttcaaaattttcccgtccctcatacggatgctgtccgactacatattccgctccttttccctgctggcacgcaccgaaagcaatctgttttgccaccggccacaggatatttccggttgcaggacgaatcatcggagaggaaagcaccactttcgcgaaaagctccggctcctgcgctgcctccgctaccgcaagacctccacccatggaatgtccatataaaaataccggaagtccagggttttcttttgctgccatctttgccacatacagaaaatcgttcacataccgctgataatcgtccacataaatcagcgaactatccggtatcagccgataacttcttccatgcccgcagtactctggcagatacacatgatactgttttttcacaaaataataaatcacttctttatatttttccgcagtttccgtaaacccatgggaaatcatcaccacacccttcggactgtccgccagatatctctcacagtagattttcttcccctcttcccgttccggccacagcacggacttgcggatatccagatacggtttcacaacattttccatctgttcccggtaaccctgctcacttaaaattaatctctccacgctattcctccagactgctgttctatacaatatattataatagaatttatcaatctgtctaccaaaaaggctgctaccattttgcaccatgaatactgtcagcacactctgccggctcatctcgggattcagatatacggtcagtgcacttaacgtagctcctccggtggcaactgtaaccgccggcgccgcacacgtcacacaaagatacaacacttcaaacagcttggaaaatatcggtgcatattttccgtaaaaggaatccgttggccgcatccagttcaatctttcggatcccccaaatatgtactataactaaaaaaggtccaccggacctttttgtcgtatgcttggcaacaaaaaacgtgcggaaaatactttttttccacacgttttactgctgtttttttctgtttctttatttactatctctctcacgcgaattccgccataatatccgccacatgctccatcttttcacaccgccatgcgttttccccgcaaaacagcagtgcatcatccgtctcaccctttgctgcatgcaccagcgctctggtgatacagtatggtgtgttcgctggattacaggtagcgatacactgatagcattttttaattgactctcgcctgctttctttttcctccaaaaaacggtttcgtatcgcccgtcccggcattcctaccgggctgtccacgatcacaatatcttctttctttgcatgcagataggtctgtttatacgcctcggaggcatcacattcccaggttgtcacaaaccgggttcccatctgtacgccatcggctcccaattccattgcatgaagcatatcttctctggtaaaaatcccgcctgccacaaccacaggaatctctttttcatacttatccgcatattttttcacttccgcaagaatccctcgaatctcctgatcataggattccggggtaaactcctccagctgctttctggaaaatcccagatgtccgccggctttcggtccctcgatcaccacaagatccggcatccgctggtaatgatgatcccaaaagcggcagatcactctcgccgccttcacagtggatacgatcggggcgatcttcgtcttacttcccgcaaccagttttggcagttccatgggaagtcctgcaccggaaataatcaggtcaatcccggctttcacagcggcttttacatactccgcatactgctttgttgctaccatgatattcacacccaggattccacccttggcaatttctctggctttttggatctcttctccgatcacccgcagattggttccgatgggatcttttttaaactcaggatcccgatacccgatctgtgccgtggaaatcactcctacaccgccacaggctgccacacttcccgccaatccggaaagactgattccgacacccatacctccctggatcacaggaatcctggctgtaagttctcctattttcaatgttttcatcttttctcctacatccgacgaaatctttcgtaccgttcttccacaatctgttctctcgtcttctgacagcttttccgcaaaaatccatccagatctttccggagctcctctgcaatctccggaagattctcctcattcgccgattccggctcccggatcactttttcaataatctgcaattttttcagatctttcgctgtgatcttcatcacctcagaagcctctttcgcccgttttccgtctttccacaagatcgaggcaaatccctccggtgacagaatggaatatgttgcattttccatcatccagacttcatccgtcactgccagtcccagcgcaccaccactgccgccttctccgatcagaatgctgaccattggtgtctggattccggacatctccagcagatttctggcgatggcttctccctgtccccgttcttctgcctcgatgccacatgccgctcccggtgtatccacaaaagtaactaccggccggccgaatttttctgcctgcttcatcagacgaagggctttccgatagccttccggagacgccataccgaagttccggtaaatattttcctttacattctttcccttctgctgcccgatcaccgtcaccggctgtccgccaaacatggcaattccaccgatcactgctccgtcatcccgaaacgcccggtcaccgtgaagttccagaaaatcatcaaagacctgctgcacataggaaagtgttgtaggacgttccttactccttgagatttccacccgttcccaagcagtcagttcttttttatcacatcctgttgcttttccacgactgctcctgatttccggcaggttttccacattttgcgtatctccatagtggatatattgcatggactcctgatgaacattcagaagtttccacactgtctcttttaattcctgccgttcaaccacaccgtcaatgattcccttttccaccaggaattctgccctctgaaatccttccggcaatttctgtccgatggtctgcgcgatcactctcggtcctgcaaatccgatcagtgccccaggttctgccaggatcacatctccaagcatcgcaaaacttgccgtcacaccgccggtggtcggatcggtcagcacaggaagatagaaaagacccgcttcactgtgtttccggatcgccgcagaggtttttgccatctgcatcagagatacgattccctcctgcatcctggcaccaccggaactggtaaacagtaccaccggcagtttttcttccgtcgcccgttcaaaagctcttgtaattttttcacccacgacataacccatgcttcccatcaggaaacgggcatcgcagacaccaagtaccgtcttcagaccatgcaccatgcattttcccacagtaactgcttcatgaagttttgtcttttcctgcagatctgcaatcttttcttcatatcccggatactccagcggattttccgtttccagatcggtaaaccactcctgaaatgtccccggatctgcaaccatgcggatcctggttctggttccgatcctaaaatatccctcgcacttcggacatacatatccatgtgcttttacatcatcccggtataccacttctccgcatttcggacacttaagccacagtccttccggtgccgatggctcttttttttcctgattcctgtcttctctgtcccggaacagaactgccgtctttttaaacatatgttttaatttcgccatagttaaaacctcctgtctgcccggacaggttttctgtcctacagattaaaatgcatcgggataaaatccgttgtgatctctcccgcctgaaaatcatcattatctaatatctcatactgaaaatccacattggttgtcacaccatctatgatcagttctcccagcgtactgcgcatcttatcgatggcttcctgtctggttctcccatgcacaattactttcgctatcatggaatcataaaagggcggaatctcatacccgttataggctgccgtatcgatccgtacaccatttccaccaggcagatgaatttcttcgatgacccccggacacggccgaaaatgatgagcaggatcctctgcattgattctgcattccatcgcatgaccctgcagatgaatatcttcctgctttactgaaagtggttcccctgctgccacacggatcatctctttcatcagatctacaccggagaccatttccgtcaccggatgttccacctggatccgtgtattcatttccataaaataaaaatttttatccttatccagtaaaaattcaatggtaccggcactttcgtaatgtacagcctttgctgcacgcactgccgcatcacccatccgtctgcgaagttccggtgtcagtgccacactgggagattcttcgatcatcttctgatgatttctctggatcgaacagtcccgttctccgaactgcacaacatttccaaacttatctgccatgatctgaaactctatatgtctcggttcctgcacatatttttcgatatacatggtgttatctccgaatccacgtactgactctaactgggctacctgaaagttctcctcaaagtcgtccggtccgaaggcaatccgcatcccttttccaccgcctccggaagatgccttgatcatcaccgggtatcctatgtcttctgccatagctgctccccgttttgcgtcatagaccggttcttttgttcccggaaccaccggaacaccggcttctatcattgtcaaccttgcctgcgatttatttcccatcttgtccatcatctccgcagtcggtccgatgaacgtaatattacatttttcacacatttccacaaaccggctgttctctgacaaaaaaccaaatccaggatgtatcgcatccgcttttgttgcgatacatgcactcagaatctgctccatattcagataactgtctgtcgccgctgccggtccgatacaaacagcctcatctgccagctgggtatgcagtgcttcccggtctgcctccgaataaactgctaccgtagcgattcccatctctctgcaggcacggatgatccgcactgcaatctctcctctgtttgcaatcaatattttccgaaacatgtttgttctcctatccaatggctaccgtaagttctgccgttgctgccacttttccatctaccgtagctgttgctcttgcaatcgcaaccggtcccttctgtttgatcagttccgtctccagtatcaaaacatcccccggaaccacctttttcttaaatcgacagttgttaatcccaccaaaataagcagtctttcctttgaacttctcacagcttaagatacataccgcacccacctgcgccagtgcctcaatgatcagcactcccggcatcaccggctcctgtggaaagtgtccacggaaataatactcatcatatgtcacacatttttttcctgctgcccgtacccccggtaccagttcttctatggtatccaccagaagaaacggatgccggtgtgggataatatccatgatttcttttgttgttaacactgacataaactctgttacctcctgcacacaaacatatggttttcaggtattttcagtcattacccgataacaaataaaggctgtccatactctgccatctgtccgttctcaatcagaatctcttttaccactccgtcgtactcactctcaatctcattcatcagcttcatcgcctcgatgattcccagagtctgtccctttttcactgtatcacccacgctgacaaatgcttccgcatccggtgccgaagccgcataaaaggttcccaccagaggagcctttactgtctttccttccggctggcattcctcctgctgctcctgtttcccattaaaactgccagaaccggccgatactgtatctgcgtttcctgccactgcaggcatcacctgcatcccggtctgctccacgaccacctgtttttcctttcccatggagatcttcagatcgccgtctttcatggtaaaagaagtcaattctgactcggaaactgtttttatcaatgtcagaagattttcaaattccattttttactctccccactttttcacaagaatgctcgcgttatgtccaccgaatcccagcgaattcgaaagtgcatattccagatcttcttccacaccgtcacctgccacataattcaagtccatttcctcgtccggtgtcgtatatcccgccgttgcatgaataaatctgtcctgaatctctttcacgcaggtaataaattccacagcccctgcagcgcccagcaaatgacctaccatagacttggtagaattcactttcatctcgtacgcatgctctccgaacagttttttgattgctctcgtctcgaacagatcattgtgatgtgtcgcagttccatgtgcattgatatacatcagttcctcttttttcactcccgcttcttccagtgccagttccatcgctttcgcagccccggaaccatcctctgccggcgaagtaatatgatacgcatcactggttgcaccatatccgacaacctccgcaagaatcttcgcgccacgctgtttcgcatgctccaattcttccagaacaaccactccggatccctctcccatgacaaatccacttctgtttttgtcaaatggaagtgaacacttctccggggcgtctaccgtagaaagtgctgtcaatgcggtaaaacctgccacaccgaccgggcagatacttgcttccgtaccgcccgccagcatcacatccgcatctccacattggatactgcgatatgcctctccgatggaatgtgttcccgttgcacacgcggttaccacattcagactttttcctttcagtcccagttgaatcgaaacatttcctgctgccatgttggagatcatcagtggaaccagaagtggatttactctggaaggtcctttctccgcaattttatgacatgccgtctctgctgcctgcagacttccgattcccgatccgatggaacatcccacgcgaaacggatcttctttttccatatccagtcccgcctgttcaaacgcctcttttgctgcagccactgcatactggcagaacaactccattctctttgctgccttaaagtccatatagtctttccctgcaaagtctttcacttccgcagcaatatgtactttataatccgtcgtatcaaaccgggtaatctcaccaaatcccagtgtctttttcttaacattttcccagaacgtatccacaccgatcccaatcggtgtcacagcacccattccggtcaccacaactcgtctcatagtctctcctttctttacatcgccataccgccatctacacagataacctgtccggtaatataatctgctttttcagacgcaagaaatgccaccgtattggcaatatcctgtgtctctccgaatcttcccagtggaatctgtgctactgctgcctctttcacctgacttgaaagtacttctgtcatctccgtatgaacaaatcccggggctaccgcattgaccgtgatgcctctgcttgccagttccctcgccaccgtctttgtaagtccgataattcctgccttcgatgctgcataatttgcctgtcctgcatttcccaacacaccggacactgatgcaatgttgatgatttttccacttttctgtttcaggaaataccgcgacagatggcggatcgtatgaaaacatcccttcaggttggtttccacgaccgcatcaaactcttcttcactcattcgcaggatcagattatctctggtaattcccgcattatttaccagcacatctacatgcccgtaactttttatcagctcctttgccattgcttctgtctgctgataatccgccacatcacactgataaagaacgccgtcgccaccatttttccggatttcttccagcacattctttgccctcgcttccgatccgcagtaattgacaactacaaacattccttcttttgccagagtgagactgatctgtcttcctatcccccgacttgctcctgtcaccagtgctacttttttctccatcgctgctcctttcaccgaaagttcatttttcatatttcctgtaaactttgattatttgtacctgttagcaggtaactgtgagggtactgaacagttacttactgtttttcacccaacatctttacaaccgcgtccagatcttctactttttcaatgtgtaatccagttacatttttattgattttcttcaaaaatcccgtcagtgttcttcccggtccgatctcgataaacgtatccacaccatccgcaatcatccgttccacactctgctgccacttcacagaagaatacacctgtctgccaagcagttccttgatctcagaaggctctgtcacatattctgctgtcacatttgtgacatacggtgtggaaaatgctctcagttccacctgctccaacacttttccaagtttctccccggcttcttttaacattgatgagtgaaacggcccgctgacatttaacgggatacatcttcgcgcccctgcctctttcagcttctcagccgccactgccactgcgccttcctctccggtaatcacaatctgtcccggacagttataattggctaccgaaacgatgccttccgtctcgtcgcagattttcgcaatcttttctccgtccattccaagaactgcacacatagcaccacctgtaggcactgcttcctgcatcaggatgcctctctgccttactacacggaacacatcctccaaagacatggctcctgcagtcagaatcgctccatactctccaaggcttaacccggcagctacatctgccttcactcccttttcctgtaaagctgccagaattgccgcttccgtcgttaacatggcgatctgcgtatattctgtaatatcaatctgctcatttttttcaaaacaaagtcccggaaggttcaatccggtcacttctgacgcaattgtatacaccttcctagatacagaaatctgttcgtaaaactccttacccattcccacatactgcgcgccctgtcccggaaaaacaaatgccagtttacccatgaatgtctccttctataatttgattttcaaagtatttatttaaatttttgtggcgacaaaatcagattcccatacctgttatttctatcgccactttttatttttcttattttatgataccagggttccaagatatacaaagcaaaatgccatcaccgaaagtaatttactcaagcaacgagtcaaaggccgtgttcgcacggaactttgatgaatgccacgataacgatactttcctgtttttcattttagcaatgcaacaatttctcagcttcagtcataatttcctgcagaatctccttacagctctgtctcttactcaccagacctgcaatctgccctgccatcactgtgccgtttaaaatgtccccatccataactgctttccgaagagaaccaagtgtcatccgttccagttcctcaaacggtacaccttcctgttcctttttgatatattccttcgtcatctgatttctcagacatcgaaccggatgtcctgtactctgaccggttactacagaatcaatatcttttgctttcacgattctgtctttatagttatcatgaacaatcgattcgtctgccactacaaaacgggttcccatctgcactccctctgctccgagcataaaagaagcagcaacaccgcgtccgtctccaattccacctgcagcaattaccggaatatttaccgcatccacaatctgtggaattaacgccatcgttgtctgatttccaatgtgacctccggcttccatgccctctgctactaccgcatccgcaccatatcgttccattctctttgccatagctactgatgcaacaaccggaatcaccttaacaccagcttccttccacatcggcatatatttctccggatttccggcacctgtggtgaccgcctgaattccttcttctactacgatttttgccacttcatcagcattcgggttcagaagcataatatttacaccaaatggtttatcagtcagttcttttgcctttctgatctcttcccgcacaatttccggaggtgcacttgccgcaccgatcagaccaaatccgcctgcctcagatactgccgccgccagatgatgttctgccacccaggccatacccccctgaataatcggatactcaatctgtaaaagttctgttactttcgtcttcatctgcttctgtctccttccctgctttcagaaaaggtgtggattatgcctccacacctttattcttcagatattccataactgctccaactgttgtcagttcagccagttcttcagacgggatctcaacttcatatttttcttccagtgccatcaccagttcaaacagatccagagaatctgcacccaggtcatccttaaatgaagttgtttctgtaatactgctctcctcacagtttaactgttctgcgatcatctctttcatttcttctaacatcgttattctcctttacacatgtttcttattatcaataattttagtttccaatgttttgactttcaaagtataatacacaaacaatgttttgtcaatgaattcttttttgattttcaaagtatttttaacgattattttttatttatattcttcccaccatctctcttggactgtggcataattttggagatttctcttcttacgacaatatgaaaaagctctgctttaccgcttttgatcatggcatcactcattttgatcttgccaacaattacggacctgaaccgggaagtgccgaaaaacacttcggtctgatcttaaaagaacacttcttcgcttaccgggatgaactgttgatcagcaccaaggccggttacgatatgtggaagggaccttacggtaactggggcagccgcaagtacctgattgccagcctggatcagagcctgcaacgactgggactcgattatgtagatatttcttcctttcatgcagaaaagaagtccctcccgtcatatctgtcgatcgggagggcttttttcgtatgttcctgcataataaatgtacaggatctacaaatctatacaccctttcagattatagatttgaatagatccacaaaagaaactttcggaatgcgtgttatcgagcaaacctttaattaacactgacatcttttttaaatgcacttcgcgaattttactcgttattgcgacagtcgcgtaaatcaaaattgatccgctgaaccaattattgctattaaatacaaaaaaaccgttttcatataatatgaaaacggttgaaaatgaggcatcggggattcgaaccccggacaacttgattaaaagtcaagtgctctaccaactgagctaataccccatatgcccagaaccggaatcgaaccagtgacacgaggattttcagtcctctgctctaccaactgagctatctgggcaaaattgcgggagcaggatttgaacctgcgaccttcgggttatgagcccgacgagcttccagactgctccatcccgcgatagtattaacatcacctttaagtgataatggatggaggtgaattcaaacctttttgctatcatttcagatagtttcgattcgtttattacctgaatccaatggatggaggtggattcgaaccaccgaagcaatttgcagcagatttacagtctgtcccctttggccactcgggaatccatccaaaatatcgcatattcaattgtacgatattgtattgatttctcaatacaaagccgatgatcggactcgaaccgataacctgctgattacaaatcagctgctctgccaattgagccacatcggcttaaaaaaatgggacctacagggctcgaacctgtgaccctctgcttgtaaggcagatgctctcccagctgagctaagatcccattatttttgacacactctgcaattcttgaaccactggtcgttcatgctttgtgtgaacgacccagacgggactcgaacccgtgacctccgccgtgacagggcggcgctctaaccaactgagccactgggccatctgatcatgtaccttcaaaactgcacacacgtaacatccttcttcctactgctttgcgatcgaccgttccaggtcaaaccctcgaccgattagtaacagtcagctccatacattactgcacttccacctctgccctatctacctcgtcgtcttcaaggggtcttacttctttcgaatgggatatctcatcttgaggggggcttcacgcttagatgccttcagcgtttatcccttccggacttggctaccctgccatgcagctggcactgcaacaggtacaccagcggtccgtccatcccggtcctctcgtactaaggacagctcctctcagatatcctacgcccacgccggatagggaccgaactgtctcacgacgttctgaacccagctcgcgtaccgctttaatgggcgaacagcccaacccttgggacctactacagccccaggatgcgatgagccgacatcgaggtgccaaaccactccgtcgatgtgaactcttgggagtgataagcctgttatccccagggtagcttttatccgttgagcgatggcattcccacttaataccaccggatcactaagtcctactttcgtacctgctccacccgtcggtgtcgcagtcaagctcccttctgcctttgcactcttcgaatggtttccaaccattctgagggaacctttgagcgcctccgataccctttcggaggcgaccgccccagtcaaactccccacctgacattgtcccccagccgggtcacggctgctggttagaaacccagtactgcaagggtggtatcccaacaacggctcctcggcaactggcgttaccgattcatagcctcccacctatcctgtacatgcaataccgaatcccagtatcaagctggagtaaagctccatggggtctttccgtcctggcgcaggtaaccagcatcttcactggtacttcaatttcaccggatgcattgtcgagacagcgctcaaatcattacgcctttcgtgcgggtcggaacttacccgacaaggaatttcgctaccttaggaccgttatagttacggccgccgtttactggggcttcaattcaaagcttcgcttgcgctaacctctcctcttaaccttccagcaccgggcaggcgtcagcccatatacctcacctttcggttttgcatagacctgtgtttttgctaaacagttgcttgagcctattctctgcggccacatttctgtggcaccccttctcccgaagttacggggtcattttgccgagttccttaacaatgcttcttccgtcggccttaggattctctcctcatccacctgtgtcggtttacggtacgggtacaataagaacaatagcggcttttcttgacgcatggctcacatacttccctactagatttcggtccgcatcacgccttcggattgccctgcggtttttcctacaggactcctacctcgcttgcacgcggctttccattccgcgcctatgctctccacacgtgtccccacagttctgtcttactgcagtacaggaatctcaacctgttgtccatcggctacgactctcgtcctcgccttaggccccgacttacccagggcagatcagctttaccctggaaaccttagatattcggccgagaggattcccacctctctctcgctactcattccggcattctctcttcgatacactccacagctccttccggtactgcttcgttgcgtatccaatgctcctctaccaatgtcttcagacattcctcagcttcggtgtcgtgtttcagccccggacattttcggcgcaggacctctcgaccagtgagctattacgcactctttgaatgtatggctgcttctgagccaacatcctggttgtcttcgaaatcccacatccttttccacttaacacgtactttgggaccttagctggaggtctgggctctttcccttttgactatccaacttatctcgtatagtctgactcccgataagcatctacacggcattcggagtttgatattcttcggtaagctttgacgccccctaggaaattcagtgctctacctccgcaagactctatcgaggctagccctaaagctatttcgaggagaaccagctatctccgggttcgattggaatttctcccctatccacacctcatccccacccttttcaacggatgtgggttcggtcctccattgccttttacggcaacttcaacctggacatggatagatcacccggtttcgggtctactctgactgacttttccgccctcttaagacttggtttcccttcggctccacggctctaccgtttaacctcgccagccagcgtaactcgccggaccgttctacaaaaagtacgcggtcgcactcataaggtgctcccacagcttgtaaacacagggtttcaggttctctttcactcccctcccggggtccttttcacctttccttcacagtactatgcgctatcggtcactaaggagtatttagccttggggggtggtccccccgacttcccacaaggttccacgtgtctcgtggtactctggatcctgccgtcccggtccggatttcgtgtacggggctttcaccctctctggctggctttcccaaaaccattccactatcctttctggtaacttatgcagtccataaccccagcatgcacgcacgctggtttaggctcctcccatttcgctcgccgctactctgggaatcgagttttctttcttttcctccggctacttagatgtttcagttcaccgggttcccttccatacgttatggattggcgtatggatacctggagtttatccaggtgggtttccccattcggatacctgcggatcaatggatatttgctcctccccgcagcttttcgcagcttatcacgtccttcatcggctcttagtgccaaggcatccaccctgcgctctttcttgtttgaccttccagttttactagcgtttaaaactggcggttctctcgcagtttcatttcatcgtgtttacaatgtaatgagtagttattgttttgattcgttatccttaaaagataactcctcggatgtctctttttcctatctctaaacgtttaacgtttttggattgtttttcgtatatgcagttttcaaggtacatgcttgctccgcttgtgcgaagctctcgactgatgctttatcagtcatcaggaaactgaacttttgttcaatcctctgatcactggtaaaaccagtttttaatggatccggcatccacctactctcccacaccgtctccagtgcagtaccatcggccgctcaggtcttaaccgtcgtgttcgggatgggaacgggtgtgtcccctgagcgcatcgacgccggaaatttgctacctcttcggtaactcaacagtaaaacacattcatctactttgtcttcccttagaaaggaggtgatccagccgcaccttccgatacggctaccttgttacgacttcaccccagttatcggtcccaccttcgacggctccttcctttcggttaggtcaccggcttcgggtgttactgactcccatggtgtgacgggcggtgtgtacaagacccgggaacgtattcaccgcagtatgctgacctgcgattactagcgattccagcttcatgtagtcgagttgcagactacaatccgaactgagacgttatttttgagatttgctcacactcgcgtgatcgcttccctttgtttacgccattgtagcacgtgtgtagcccaaatcataaggggcatgatgatttgacgtcatccccaccttcctccaggttatccctggcagtctccacagagtgcccaacttcacttgctggctactgaggataagggttgcgctcgttgcgggacttaacccaacatctcacgacacgagctgacgacaaccatgcaccacctgtcttctctgtccccgaagggaaaggacccattacggtccggtcagatcgatgtcaagatttggtaaggttcttcgcgttgcttcgaattaaaccacatgctccaccgcttgtgcgggtccccgtcaattcctttgagtttcattcttgcgaacgtactccccaggtggaatacttattgcgtttgctgcggcaccgaagagctttgctccccaacacctagtattcatcgtttacggcgtggactaccagggtatctaatcctgtttgctccccacgctttcgagcctcaacgtcagttaccgtccagtaagccgccttcgccactggtgttcctcctaatatctacgcatttcaccgctacactaggaattccacttacccctccggtactctagattgacagtttccaatgcagtcccggggttgagccccggcctttcacatcagacttgccattccgtctacgctccctttacacccagtaaatccggataacgcttgccccctacgtattaccgcggctgctggcacgtagttagccggggcttcttagtcaggtaccgtcattttcttccctgctgatagagctttacataccgaaatacttcttcgctcacgcggcgtcgctgcatcagggtttcccccattgtgcaatattccccactgctgcctcccgtaggagtctgggccgtgtctcagtcccaatgtggccgtccaccctctcaggccggctatggatcgtcgccttggtaggccgttaccctgccaactagctaatccaacgcgggtccatctcataccaccggagtttttcacactgtaccatgcagtaccgtgcgcttatgcggtattagcagccatttctaactgttatccccctgtatgaggcaggttacccacgcgttactcacccgtccgccactcagtcactaaggacttcatccgaagaatctgcccaaagtgcttcgttcgacttgcatgtgttaagcacgccgccagcgttcatcctgagccaggatcaaactctctaaataaatgtttgctccaggtcaaaatcaactcttggctaatttatcccttttactgtttttaaggatctttcgatcgttcgtttttatgattttaaaaagaactttcgaggaatgtgtttcactgttcagttatcaaagatcggttttgcattgccgtttgtctcaaacagctttgctattatatcatgtcgtttcctgcctgtcaagaactttttttcaacttttttgaagttgtttttgtttctctcttgcagcaactttgatattttatcacatctgaccagctgttgtcaagaactttttcatttctttttatagctctttgtcagacgcaactcgtttatgttatcacgagtcttttcagatgtcaagaacttttttcatttctttccatcaacgcagaaggagggatttgaaccctcgcacggcgcaaaccgtctatacccttagcaggggcacctcttcagccacttgagtacttctgcacgtcactgattactcagtgagcaaaatcaattatactaaaacattttacatttgtcaacggtattttttacatttcttcaaattctttaattgtttcttcgattcgttgttttaccatcgccgcaatctccgttgtcttcattccctggtatttttcatacgggattggctccagaaaatgtacctgtaccgtcagcttcttaatagaattcgtatcaaaggatttgtacgaatcgatcagcgccaccggcacgatggggcactgggctttgactgcacttttaaaactcccgcctttaaagtccagaagctgatttcccttccggcttctggttccctcggcaaagatcagatagttccggccttctttcacttcttctgctacctgtttgatcacctgcagcccctgacgcagatcatttcgatctaatggaatagctttcatgcaggcaaagacctgttttaagaacggcacattctccacttcttttttcataactactgaaaacggacgtgggcagacttcgagtatcgccagcacatcatatagcccctgatggttcggaaaaaacataaatccatcctgctccgggatgttttccactccataggcatcgatggtgatacgaccgccgatattcgcccggcggtcgatcatttttaatacctgatatctttcttcttcggtgtatttttctacgtgggctgccgtatagcacaatttaaaccagccatacggaacaaaccacaggttccgtaacaccattaacagaattcgtttcattcttcagactccatattttcctcttctgcttcttcctgttcgtttccttctgtcttatcctctttttctcttactttggcgatacttgcaacagaaactttctcatccaggttcatcagtttgacaccggatgtgattcttcccagaattgagatatccgagcaggcaatccggataatgattccttcggtggtgatcatcattacttcattgtcatcattgactgcctttacccctaccacattaccggtcttttcagtgatcttatagcatttcacaccttttccgccacggttctgtacggagaattcgctcatggaggtacgtttacccatacctttttccgatacgatcagaaggtaatcaccctgggagcacagctgcatgccgatgatttcatccccgtcactgaggttgataccacgaacacccatggatactcttccggtgcttctgacatccgtatctttaaagcggatacactgaccgtatttggttaccagaatgatatctttcttgttatctgtgaattttacttcgatcaattcatcgtcatctttcagagagatagccgcaagacctgtctttctgacatttgcataatcctgaatcggtgttttcttcacgataccgctcttggttgccatgaacaggtactgaccctggctgtaatctttcagggacagaaccgctgtgatcttctcgcccgcctgtaactgtaacagattgatgattgccgtaccacgggcagttcttcctgcttccggaatctcatatgctttcaggcggtacactttacccatgttggtaaagaacatcagataatgatgggtcgttgtcatcagcagttcatcgatataatcgtcctcgatagtctgcatacccttgatgcccttgccgccacgattctggcttcggaagttatctacggtcattcgtttgatatagcctaattttgtcatggtaatgacggtattttcattcggaatcatatcctccatggaaatatcgaactcgtcaaatccgatggctgtctttctctcatcaccgtatttttcactgatagcaaggatctcctcgcgtatcacgcgaagcagcagatttctgtctgccaggatggcttccagtctgcggatacgagccatcagttctttgtattctgcttccagtttttctctttccagaccggtcagtgtacgaagacgcatatctacgatggcctgtgcctgtgcatcggaaagttcaaaacgttccatcaatctggcttttgccacctgagtattctcagaaccacggatgatacgaatcacttcatcgatattatccaacgcctttaagagcccttccagaatatgagcacgttctcttgctttgttcagatcgtactgggttcttctggtcacaacctcttcctgatgagccagataatgtttcagtatctccatcagattcatgaccttcggctggttgttgaccagtgccagcatgatcacaccaaaagtatcctgtaactgcgtatgtttatacagtttgtttaacagtacatttgcattgacatctcttcgcagttcgatgcagatacgcataccttctctgctggaatggtcattcaaagcggtgataccgtctattttcttttcttttaccagatctgcgattttttcgatcagtctggctttgttgaccagatacggaagttccgtaacaataatctggctctttccgtttggtaatgtctcaatattcgacactgcacggacacggatcttgccgcggcctgtccggtacgcttcctcgatacctctggttccaaggatcgttgctccggttggaaagtccggtccttttacaatctttaagatctcttcgatctcggtatcccggttttcttccacgatattatcaatgattttcaccaccgcagcaataatctcttttaagttatgtggcggaatgttggtcgccatacctaccgcgattccggaggtaccgtttaccagaaggttcggataacgagccggaagtaccgtcggctctttttctgtttcatcaaagttcggagcaaagtccacggtatttttattgatatccgcaagcatctccatggaaattttactcagacgcgcctcagtatatcgcatggcagccgcgccgtctccatccacagaaccgaagtttccatgtccgtcaaccagcggataacgggtggaccagtcctgtgccatattaaccagggctccatagatagaactgtcaccgtgcggatgatatttacccatggtatcaccaacgatacgtgcgcattttctgtgtggtttatccggaccgttgttcaattcaatcatagagaacagtactcttcgctgtaccggctttaatccgtctctgacatccggcagcgcacgggatgcgatgacactcatggcataatcgatatacgattcttccattgtctttttcagatccacctcatgaaccttgtcaaaaatattgtcttccatctttttctcctattcgtaactgttcagtaccttcaaggaatatttcttactgaacagttatctttttcatcctttggattaaatatcaagatttttaacttttaatgcattttcctctatgaactcacgacgcggttctactttatctcccatcaaagtggtaaaagtaaggtcaagttccgatgaagtctcatcgtccatggtcacacgaagaagcactcttcgctccggatccatggtggtctcccacagctgatccgcatccatctcacccagacctttgtatcgctggatcttgttgttaccgtctcttccgatctcagtcaggatattatccagttccttatcgtcgtatgcataccagattttcttatttttctcaattttatacagcggtggctgtgccagatacacatatccctgtttgatcagttccggcataaaacgatacaggaacgtcaacatcagggtagcaatatgtgcaccgtccacatcggcatcggtcatgatgatgatcttgtgataccgcagtttggaaatatcaaaatcttcatggataccggtaccaaatgcagtgatcatggctttgatctccgcattgccgtagattcgatccaggcgggctttctccacattcaggatctttccacgaagcggcaggatcgcctgggttgcacggcttctcgctgtcttggcagaaccaccggcagaatccccctctacgatgtagatctcacagtttttgggatctttatccgtacagtctgccagttttcccggaagagacaatccttccagtgcagattttcgtctggtcagatcacgggcttttctcgccgcatctctggcacgttgtgccagtacagatttgtccacgatggtttttgccacagacggattctgctccagaaaaatctccagcgttctgcttaccaccgcatccactgcacctctcgcctcactgttacccagcttctgtttcgtctgtccttcaaactgcggttcttcaatttttacactgatgatggcggtcagaccctcacggatatcttcccctgccagtttttcgttttcttttaacagtttgtttttcctggcatactcattaaaagtctttgtcagtgcattacgaaatccaactacatgggttccgccttccggtgtggtgatgttattaacaaatccataggtggtttcattataggaatcgttatgctgcatcgccacttccaccgccacaccgtctttggttccctcacagtagataatttccggatataacgcttccttactacgatttaagtacgtaacgaattctttgattccgccctcgtaatgaaactctttgaccagttccttttctccacgctcatcagtaagacggatttttaatcctttggtcaaaaatgccatctcacggaatctctgtttcagggtatcaaaatcaaacaccgtttcttcaaaaatctctttatccggcagaaatgataccatagttcctgttttttcctgctcacactctccgatgacttttaatttgtatatggtttttccccgttcatatctctgacggtataccttgccctcatggtagatcgtaacttccagccactcggaaagtgcattgactacggatgcacctaccccatgaagtcctccggataccttgtatcctccaccgccaaattttcctcctgcatgaaggatggtgaatacaacttccacggccggaatccccgctttgtgattgattcccacagggataccccttccgttatctatgacggtaatggaattatcttcctgaattttgacatcgattacatcacaaaatccagccagtgcctcatcaactgcattatctacaatctcatagaccagatgatgaagtccgcggatcgatgtacttccgatgtacataccgggtctttttctgaccgcttccaaaccttccaatatctggatttgatctgctccgtattctgtactcatccttatcctcctaaatttttatttaaaaatcaatttttccttcggtcacccgaaatactctgtcaatcgaaaaattattctcgatcagttcatccagaccggtacatgtgatcaccgtctggatattgtgaatgctctgcagcagataattctgcctgctgctgtcaagctccgacaacacatcgtccaaaagaaggaccggatgatccttcgtcaccttttccaccagatagatttctgacatttttaaagaaagagctgccgtacgctgttgcccctgagaaccatactttcgaatatcgattccgttggtctgtacacaaaaatcgtctctgtgaggacctacggacgtcacacggaaacgaagatctttttctctcgcactctgcagtttttcttcaaatactttctcttccacatccggttcatacaacagccggatctcttctttcttcccggtcaggttgctgtggatctgccggataatctctcccagttcttccataaactgccttctcagagaaatgatcttcttcccgtaagaaaccagctgcatatcccacacatccaacgtctccgtcaatccgggctgaaaaccaatgtcttttaacagcttatttcgctgatttaacaccttattataactcgtcagctcctgtaagtaaactttatttaactgacaaagttccaaatccataaatcttctcctctcggaaggcccgtttttgatgatattcaggtcttccggagagaatgccacaagattcacgatgccgaaaagttctgctgctttcctgatcggaatcccgtcgatggcgatgcctttggctttattttttttcagatgcatatcgatcttatgcgatacaccatccttctttaccatcatcctgatatgtgactcgtcctgttcaaaccggatcatctctttatccttacttcccctgtgagattttgtggttccgcaaagataaacagcctcgagcacatttgtcttcccctgagcattatctccataaaggatattcgtccccggatccagaacaatagacagttcctcatagtttcgaaaatttttcaattccaacgattcaatgtacatactttttatttttcaatccgcagttcctgtccgtcaaaagaaaccacatctccgtcgtataattttcgtcctcgtcttatgtcaacctcgttgtttacctttactaaaccatcctggatcaccagttttgcttccacgccgtcttccaccaggttcgcagctttcaacgcctgcccgagtttgatatattcgtctctcagtttaattatttccattttttctcactttcttaccgtgcggtattaaaattcaccggaagaatcagataaatataggattcttcttcgtttttgatgaaacaaggagcctttggattgaccagataaatagaaatttcttcatcatcgatcactttcagcgcgtcgattagaaacttcggattgaatccgatcataatatcttttccttctttatcgatatcgatttcttcattcatggaacccatctgggaattgatgttcagctgcataccggtatcatcgatcgtaataatgatcggttttttgtcaccttcttttacaaaaagtgtggcacggtcgatacaatcgaggaattcccgtttattaatcttcacttttgtctcataatcgctggaaagcatctgatcgatccggaaatattctccttcgatcagtctggaaacaactactgtatcatcaaattcaaaaacaatatgattgtctgtaaagaaaatctttacctgatcttctacttcacccgaaaggatcttgctgatttcatttaatgtctttccaggaacgacaacctttcttgaagggtaattatctttcaattcaattttccgaatagcgatccggtgaccgtccagtgaaactactttcaagatattttctttcatttcaaagagttcgccggtcattagtttgttattttcatttgctgcaattgaaaatattgtctgacgaatcacctcttttaatgtaaattgcgagatttcaataccttcactacgttcaatgactggcagataagcgaaatcatctccagattttcctggaattgtgaattttgctttttcacaggtaattgttgtattcaggttagtatctgtttgaatgcagacatcactgtccggaagtttacggataatatcagaaaaaagttttgcatcaagagcaacaatacctttttcttcaatgatacctttcacttttgtttcaatacccagttccatatcattagaggtaaaagtgatttccgttgcagaagcatctatcagaatacattctagaatgggcatggttgttttagaagaaacagccttcagtgaaatgttgacgctctttaataattcgtttttggcacagattaatttcataatgtgaataacttccttccctgaacccgagggctcatgtataaaaaaataataagaaattcgtagtattcgtagtaggggctgtgaaaatgtgtaaaagtaatatcagccccgaaaatataaggaattttccattggataactgtgtgcatcctgtagaagatacctgtgtatgatttgtggatgcccgaagcccgattactttgtccacacaacatacacagggaattcacaaacagaatgtggataactcatactttctaggaagggcatttaatttcccggctgaagttttttcttcagaatttcaattgctttttgagttgtctgtgaattctgtaattcctgttcgattttgtcgcaaccgtgcatgatagttgtatgatcacgatttcccatacactgaccgatggatttcagcggaatattggccagctcacggcaaagatacatggcaatttgccgaggatagacgactttactgtttctttttgtaccaataatatcctccggtgtgatgtcataatgttcggccacagtattgatgatatattccggagtgatgatcttcttatcatttggagagatgatatctttcagtacggtttcggccagctccatcgtaacttcccgtttttccaggtttgcataagcgataattttatttaaagatccttccagttcacgaatattggacttaatgttcttggcaatatattcaataatggaatcatctaagttgtaaccgtccatttcttcttttttccggagaatcgcaacacgggtctcgtagtcaggagaagaaatatcagccaacagtccccattcaaaacgagaacggatacgatcttcgagaatttccatatcttttggtggtttatcactggagataatgatctgttttttagcactgtgcagagcattaaaggtatggaaaaattcttcctgtgtagattcttttccgatgatgaactggatatcatcgatcagtaaaacatcgatgtttcggtacttttcacggaattttgtcattgcggtattgttaccgtttcggattgcttcgatcagttcatttgtgaattcctcactggtggtatacagaatcttggtggaaggatttctttctaatataaagtgtgcaacggaatgcatcagatgagtctttccaagaccaacacctccatataaaaagagaggattgtagatttctcccggagattctgccacggccagggatgcagcatgggcaaatttgttgttgcttccgacgacaaaggtatcgaaggtgtattttggattcaggtttgccatttccatgctggtattataattagtagaaacagggacgtctttttctacattttgtatatcttccggcaggacgaacttaatgtcgtagtcggacccggtcagttctgaaatagcaactttcagtgggagggcgtactttttgctgatatagttaagtccaacctgctgagaaggaaccagtatggtaaccatctggtcatcgatactgtgaatcgtcagcggttttaaccaggttttaaaagagacatctgataattcgtgttctgtctttactgtttccaatatttcgtcccatttttcgtaaataatgttcatgatttcctccataagtgcaaggcagctgatagaacgagctactttctctaccatatcttataataaaatgtggattttagcaacgactaaatgtggataagtcgataaaaaaacaaaggacaaatacttatcccgtggataaataaaaaggcagcagaagttatgcacatagaaaaagacagaaaaacagggaattatgggaattgtccaaaatgtatacacatcaaatacagtagttatccacaagttatccacatcgggtggataacttacgtaaaccatgtgtacagtcggtgtaaagatgtgtgtaaccgaatatgggaatcagcagtgttctatccagggcagtattatctgtgggaacagcaggagcaggagatacttgttttagcgataaattgaaaaaaatcaggaaaaaacggcgattttacttgacgtagcatttatttatgaatataattgaaacgatgttttctgacatacatgaaaagacgatcataaccgaataatggatattaaaggaggtgccttagatatgaaaatgacatttcagccgaaaaagagatccagagcaaaagttcacggattcagagcaagaatgagtacaaaaggtggcagaaaagtactggctgccagaagattaaaaggaagaaaaagcttatcagcataagacataagaccgcatacattgtggtcttttcttctatctaaaagatttaaaaaaattttctttaaaggtaaggaatttctatgaaatataaagatgcagagagcttaaaaaagaacagagattttcagctggtatataaaacaggaacatcttatgtaaataaatatttagtcatgtatgcaagagagaatcagctggggaaaaacagaatcggaatctccgtcagtaaaaaagtgggcaacagtgtagtgcgccaccggctctgcagactggtaagagaaagttaccggctgcatgaggatgtatttcgtagagggtttgatattgttgtggtagcccgcgtgagtgcaaaagagagaacgtttcgtgagattgagagtgcattcctacaccttggcaggttacatcaccttgtagaaaaggaagaacatgaaagcaatattgattaaaggaatcagattctaccagaaatatatttcccctttaaagagtaccaagtgtccttattttccgtcctgttcgcagtacggactggaggcaattgaaaaatacggagcgtttaagggctctcttttagcgctatggaggatcttacggtgtaatccgttctccaaaggcggagtggatccggttccgtagattgatgtaatgggaattacatttaaggaggaaacataattgaatatcgtaatgacgaaggtttcgatgcctattatcggatgggtaagtgaaattctgggatggatgatcaatgtgatatacagcggtcttgaactgatcgggatcacaaacatcggtttgtccattattttatttacactggttgtatatcttctgatgactccgttgcagatcaaacagcagaaattttccaagttaaatgctgttatgcagcctgagatccagaagatccagaagaaatataatggtaaaaaagaccaggattctatgatgaagcagaatgaggagatcagtgctgtatatcagaaatatggtgtatctccaacaggaagctgcgtacagctgttggttcagatgccggttctgctggctttgtaccaggtaatctatcacattcctggatatatctccggagtaagaaacgtatttaccggactgaccgcaaagatcatgtctgtcgatggatttggcagtatcatcagccagttcttaaccgacaacaagatcacaatgaccggaatctcagccaatacagaatttaccaagacaacaacgattgattttctgtacaaactgtccccgtcacagatggaaaaattctcacaaatcagcgatttcagcggattttccgatctgttcgataaagtagcgcagcagaccagccatatgaatacgttcctgaacctgaatatctcagataccccgctggctattatcaaaagcggtatggcacagggcggagcagcaggataccttctggtattttccgctgccatggttccgatccttgcatggctgacacagtggatgaactacaaactgatgccgcagccaaagcaggctccgaacagtgaaccgagtgcaatggaagcttctatgaagagcatgaatacgttcatgccgatcatgtctgccgtattctgtttctctttcccggtaggtatcggtatttactgggtaatcggtgctgtgatccgttgtatccagcagctggtgatcaaccgtaagatggagcagatggatatggaagacctggttcgccggaatcaggaaaagatgaagaaaaagatggaaaaaagaggtgtgtctgcacagcagatcaaccagcaggcaagaatgaatgcaagaaacattcaggcacctgataaaacatccggtctgagtcaggaagaaaaagctgcacagagaaagaaagcaacggaatattataataacgccaatgtaaaaccgggcagccttgctgccaaggcaaacatggtaaaacagtttgatgaaaagaacacaaagaagaaatagggggagaaagggctatggaattcaaagagattactgcgaaaaccgtcgatgaagccatcacaaaggcttgtctggagtttgaaacttccagtgataacttagagattcaggttgtccaggagggtacttccggtttcttgggatttatcggcagcaaacctgccgtgatcaaagttcgtaaaaaggtgcaggaagaagaattcgacatcttaaaagagctggcaaaagaagagaaaaaggaaaagaaaacccctgttaaggaagaaaagaaagaacccaaaaaagaattcaaaaaagaagtaaaaaaagaagccaaaccggtaagagagccgaaaaaagagactgctgccaaaccgcagacagaaaataaggaagtaaaaccggtggcaaaagaagcgcagccgaagccggaaccgagaaaaccggttgtccgtaccgaagaacaggtacagcagatgaaacaggatgcagaaaaatttctgaccggcgtatttggtgcaatggaacttccggtggagattaccatgaactatgataagaccgccgactgcctggaaattgattttgccggagaggatatgggtattctgatcggtaagagaggacagacactggattctctgcagtatctgaccagcctggttgttaacaaagagcagcaggactatgtcagagtgaaagtagacacagaaaactacagaagccgcagaaaagacacgctggaaaacctggcaaagaacattgctttcaaagtgcgtaaaacaagaaagccggtagtgttagaaccaatgaatccttatgagagaagaatcatccattctgcactgcagggaaacaagtacgtggaaacatacagtgagggcaatgaaccttaccgtcatgtagtagttgtttataaaggtaaataagttgttgaatggaaaagatgttatttcacagggtgtgagtagcatcttttcctgctttaagaagaatataatgctctgaaaggagtaggacagagatgacaggagatacgattgcggcaattgccacagcgatgagtgcttcaggaatcggcattatccgtatcagcggtgacgatagcatggagatcatcagcaaagtataccgctcaaaaggcggaaaaaagaagataaaagaagccgaaagccatacgatccattacggatttatctatgacaacgataccatgatcgatgaagttctggtgatgatcatgaaaggaccgagaagttataccggagaagatacggtggagatcgactgccacggcggcgttcttgccatgaaaaaggtactcgaagccgtgatccatgcgggtgcaagaccggcggaaccgggagaatttaccaagcgtgccttcttaaacggaaggatcgatctgtctcaggcagaggcggtgatcgatgtgatccaggcgaagaatgaatacgcactgaaaagctcgttaagccagctgaaaggctctgtcttaacgtccatcaaagagatccgaagcagtatcctgtatcatatcgcgtatattgaatcggcgctggatgatccggaacatatcagtctggacgggtacagcgaaaaactcgcgcagacggtagaagaggaaaagaagaagatccgtcgtctggcggactcttttgacgaaggaaagatgatacgggaaggtatccggaccgtgatcgtgggaaaaccgaacgcgggaaaatcttctctgttaaattatctggtcggagaggaaaaggcgatcgtcacggatatcgccggaacgacgagagatgtccttgaggagacaatcgttttacagggaatctcccttcggatgatggatacggcgggaatccgggcaacggaagatgtagtggaaaaaatcggcgtagagagagccagagcttacgcaaaagacgcggatctggtattatatgtcgtggattcctccattccgttagatgaaaatgatgaggaaattctggagattctccgggataaaaaagcgatcattctgttaaacaagagcgacctgactccagtggtgacaaaagagatgctggaagcgcgtacggatatgccggtgctcgcgatctccgcaagacaggagcagggtgtagaacttctcgaagaacagatcaaatcgatgttttttgcaggagaattgtcctttaacgatgaagtatatattacaaatgtccgccataagacagcgctcgaggaagcatatcagagtcttacaatggtggaaaaaagcattgccatggagatgccggaagatttcttttccatcgatctgatgaacgcatatgaagcgttgggaaggattgtgggagagtcagtgggtgaggatctggtcaatgagatcttcagcaagttctgtaccggcaagtaagagtggcagaaggagaaagaaatgaacaaactggtggaatatatagatgtcgccgttatcggagccggacacgccggctgcgaggcatcactggcagcagccagactggggcttgaaactatggtatttaccgtcagtgtggacagcatcgcgatgatgccgtgtaacccgaatatcggaggaagttccaaggggcatctggtaaaagagatcgatgcgctgggcggagagatgggaaaagtcatcgataagacctttatccagtccaagatgttaaacaaatccaaaggacctgcagtccattccctgcgtgcccaggcggataagaaaaattacagcaataccatgcgtcaggtactggagaatacaccacatctgacgatcaaacaggcggaagtgacggaactgattgtagaagatggtacgattaagggagtaaaaacatattccggcgcaacgtattatgcaaaggcagttgttctgtgtaccggaacgtatctgaaggcgagatgcatctatggagatgtaagtaattataccggtccgaacggactgcaggcggccaattatctgacagattccctgaaggcgaacggtgtggaaatgttccgtttcaagaccggaacaccggcgcgtatcgacaaacggtcgatcgatttttcgaagatggaagagcagaaaggggatgagagagttgttccgttttctttctccactgatccggaaagcgttcagatcgatcaggtatcctgttggctgacctataccaatgagaaaactcatgagatcatccgggaaaatctggatcgatctccgctatattccggtatgatcgaaggaaccggtccacgatattgtccgtccatcgaagataaagtggtcagatttgcagataaatccagacatcaggtatttatcgaaccggaagggctgaacacaaatgaaatgtatgttggcggtatgtcaagttctctgccggaggatgtccagtatgacatgtaccgctccgtaccgggacttgaacatgcgaaaatcgtgagaaatgcttacgcgatcgagtatgactgcatcaacccgagacagctgatgccgacactggaatttaaaaatatcaaaaacctgttcagcggcggacagtttaacggaagttcaggatacgaggaggcagccgcacaggggctgatcgcgggtatcaacgcggcactgaaagtcaagggtgaggaactgctggtactcgaccgttccgaggcgtatatcggcgttctgatcgacgatctggtaacgaaagaaaaccatgagccatatcgtatgatgacaagccgcgccgagtatcgtctgctgcttcgccaggacaatgcagatctcagactccgggaaaaaggctaccgtgtcggactgatcagcaaagaacagtatcaggatatcctgaagaaagaacagctgatcaaagaagaaatcgaacgggtggaacacgtaaatgtaggagcatcgagaccggttcaggaactccttgaacagtatggaagtacaccgctgacttcaggatccactctgggtgaactgatccgccgtccggaactgaactacgaagtgctggcaccaatcgataaaaaccgtccggaactccgctatgacatccgggaacaggtcaatatcaacatcaagtatgatggatatatcacccgtcagttaaaacaggtggaacagttcaaaaaactggaaagcaaaaagatcccggaagatatggattatgatcaggtcaagagtctgcgtatcgaagccgtacagaaattaaaactgtaccgcccggtaagcatcggccaggcctcccgtatcgcaggggtatctccggcggatgtatcggtgctgctggtatatctggaaagtcatcgcgcgtaaaatgagatatatgtgtggcagcagaagcttctgctgccgcctgccttagagcgtgtctgaaaaatcatttccgcaatctgcaagccccactttgcggtatattttaccctcattcggttgccgtagcccgctacgccgccctcattcggataaaatctcccacaaactgggactcgcagctcacgaaaagcctttttcaaacacgctctaacgcagatgaaagaagtatgaaaaaaatgtaagataagaagtaactattcagcaggtagtaactgtgaatgtactggactactggacagttacgataagaaaagaaaggaacaagcatggctcaatacgataccacatggtttgaaaaaggacttgccgagctggagatcacattaaatgaaaaacagatcgaacagtttctgacctactatgaacttctggtggaatggaacaaagtgatgaacctgacggccattaccgaatacgaagaagtcatcaccaaacacttcctggacagcgtagcgtctgtcaaagtgtgtgattacagtaaaccgatgaaaatcctggatcttggaacaggcgccggatttcccggcataccgttaaaaatcgcttttccggatcaggagatcgtccttctcgactccctgaacaagcgtgttaaattcctgaacaccgtcattgaaaccctcggtctcacaggaatccgcgctatccacggaagagccgaagactacgcccggcatgcagattacagagaacagttcgatctgtgtgtgtcacgcgctgtagccaacctgagtacgctatccgaatactgcctgccctatgtaaagacaggtggtcacttcataccgtacaagtccggcagaatccaggaggaactgaccgaagccaaaaccgccatcaaaatccttggcggcagcctggaaaaaaccgaaaaattccagctggcagacaccgacatggaaagatccttcgtagtcatccgaaaaatccaaccaaccggaaaaaaattcccaagaaaagccggccttccatcaaaagaaccgattaaataacaaaagaactcaagaaatcccgtgagaagccgaaaaacggctcaaaacggggtttctttgcacaagtcaacaaacagatcgaatcacatagtaaaaacgccaatatagggaaaatacgagaaaagtaaaaaataagatcattagaaattggtggaagaaaacaaaacgttatataccataaaattgaaaactgaaataaggcataaccccgtgatcggatctgaaaataactatgaaacaataaagatggagaacagatgtaaagcgtcaggtatgcaaatctgaaaacagaccagagaaaaatcacttccatgaacattcttctactacgcgcatctaaaaatcacacaaatcatataagctattcttttgaaaatgattttaaaatatcaactctgaatataggccataaatgtcaccccgtaacgttccgtctataccgcgctacacattttgactcttacattttcatacatattctccagtcaaaaagccaaaaatcgccgtccccaacagttcccataaatatcagccaataacgttccccatacacctcctctccagctttgaatacccagctcagatccctcgtatcttccccagatgagccgcttgtcgagcacgagtttgagactacaggctcaaaccgagcgcagacccggccatatggggaagatacgagggatctgagcgtccgactattcacctccccctcaaaccgagcgcagacccggccacctcgggaagatatgaggaatctgagcgtccgagtattcaaagtcacacacatttcacaaagaaaacacaaacatttcgaaacttcatcacactttttatataaaataataccaataaaggaggtaacaaactgtgatagaagtgaagaatttagtaaagaaatacggtgatcacaccgctgtcgatcacctctcatttcacgtggacaaaggtcagatctacggtttcttaggtccaaacggtgccggaaaatcaacaaccatgaacattatgaccggctatatcgcgtccacatccggcgaagtcctgattgacggacacaacatccttgaggagccggaagctgcgaaaaaatgcatcggatacctgccggagcagccaccgctgtacttcgatatgacggtagcggaatacctgaagttcgctgcagaactcaaaaaagttccgaaaaacgaaagagaaacccagatcgaacaggtcatggaactgacaggcatcaccgcgatggcaaaccgtctgatcaaaaacctgtcaaaaggatacaaacagcgggtaggacttgcccaggcgatcctcggctatcctgaaatcatcatccttgatgaaccaaccgtaggacttgatccaaaacagatcattgagatccgtgaactgatcaggaaactcagcgaagaacataccattatactaagttctcatattctgtcagaagtaagtgctgtatgtgattacatcatgatcatcaaccacggtaaactggttgcgagcgataccacagaaaacctgatgaaccattcactgggaagcaacaccctggagcttaccgtaaaaggagaaaaacaggatgttgaaaaaatgttgcgcgacgtagaagaaatacaaaaattagagtggaaaccgggagaaaacgaaaaaacagtaagtatggtgatcacaacagaagaaaagacggatatccgtgaaaaactgttttatatgatggcagaagccaagatgccgatcctaaatatgcagtttacgaaagtatccctcgaagacatcttccttgaactgacacagaacgaaacagcccctgttccggatgaacaagacaccaagccggagtctgcaccggaagatgagaccggtacagatacggaaaaagagaatgaaacagaacaggaggctcatgatgaaagcaatttataagaaagaagtaaaaagttatctgacctctatgatcggatatgtatttatatttttcattctgcttctggaaggcatctattttactgcctataacctgcagaatgcctacccgttatttggaaccacattaagtgccgttacctttatttttctgattctggtgccggttctgacgatgaaaacgattgcagaagaacggaaacagaagactgatcagttgcttttgacagctccggtatcagtcagtgagattgttcttggaaagtttctggcagtagctacggtttatgcgatcccggtactgatcatctgtctgtacccgatgatcatgggaaaatatggtaccgtatcttatgcgatggcatatacggcagtgctcgggtttgcccttcttggatttgcccagatcgcagtcggagtcttctggtcctccgttacagaaaatccggtcattgcagcagtcgtaacctttatcgtactgtttgtctgttatatgatcacgggtatcggatctctgatcccggacagttccatggcgtctctggcgtgctatatgcttctggtgctgctggctgctgtgtggatataccatatgatccggaatctgtggatcgcagcagttatcggtatcgcaggagaagcggcacttgccatcacctatgtggtaaaatccacactatttgagggaagtattcagaaattcctgtctgttttcgatattaccagtcactttgataactttaccaacggtattctggacctgcagggagtggtatatttcctgtctgtgatcattattttcctggttcttacggttcagaccattaccaagagaagatggaattaggaggctggaagaatgaaaatcaatatcaaaaagaaattaaaatcggcgggaagcaccatcaaaggaatgggaagcatcgataaaaaatccctgaaaaacggttcttacagtatgggaatcactgctattgtgatcgcggtgctggtcgttataaacctgatcgttggacagattccggaaaaatatacccaggtggatgtaagtacccagaagctgtatacgatctctgatacgacagtgaagtatctgaaagatatgaacacggatgttacgatctaccatatcgtacagtcaggaaaagaagactcggtactggaaaaaatgctgaccagatacgaagaggagtccaaacatatcaaagtagagaaaaaagacccggtgttatatccgaactttacttcacagtataccagcgatgatgtggcagataacagtctgatcgtggttgcaggggagaagagtaaggtgatcagttacagcgatctgtatgaaacagaaatggattatacaacctaccagaccaacactacagggtttgacggggaaggacagattgacagtgcgatttcttatgtcacttccgagaatctgccggtaatatatacgctggaaggtcatgaggaactggaattaaacagcagtctgacagacagcctgcagaaagctaattatgatgtacagagtctgaatctgctgacacaggatgcggttccggaggacaccggatgcctgctgatcgcggcaccgcagaaagatctttctgaagaagaaacacaaaagatcattacctacatggaagccggcggaaaagtgatgatttttacagaatataccggaacagatatgccgaatctgaagagtgtactggaaaattacggtgtaaccacaggggacggtgtgatcatggagggagataccggacattacattatgcagagaccgtactatattgttccgactattgacagttctgatattacttccgacattaagagtaacaaccgctatgtgctggcaccgatctcacagccggtaaaaacactgagcgattaccgtgatacgctgcagatttcttctctgttatcaacatctgacgaagcgtatataaagacagatgtacagaatatgaccacatatgagaaagaagacagcgatgaagaaggcagtttccaggttggtgtttctgtaaccgagcaggtggatgatgataataccacacagctggtgtgtttcggctgtgccagccttctggacgaagctaccgatcagcaggtatccggaggcaatacggatctggtgctggcagcgctgggctggatgtgtgaaaacgatgcaccggtcatcgatgtgacgagcaagagcctgaccatgagttatctgactgttccacagtttgatgcggcatattggagtatcatcgtgtgcggtgtgatcccggtggtatttctgctgatcggtacggtgatctggtttaagaggagaaaacagtaatgaagaaaaaaaggggcttatttgtaattcttgcgggggttgttcttctgtgtgtcttgatcgtgtgttattttgcactgttaaaagcgaacagcagtgaggaagagacaacggaagaagagaccacgcaggaagaagtggcggcaatcgccagtgatgatatcagcacattgacttttgaggcgggggatcaaacagtcaccttccaaaaagcggaagacagctggacactggaaggtcaggaggattttccggtggatgcttcgaaagtagacagcgtagtatcctgtctggcatccgtcaaagcggatcgtaccctgacagatgtggaggatccgggagaatacggtctggacgttccgaccaatgtgatcgaggtggtaaaaacagacggaagcagcgaaaagattacagttggtgacaagaacagttccaccggtaatacgtatatctgtctgaatgatgatgcttcaaccgtgtatacgaccagtacggattttggaagcactttttcaggcggcctgtacaattatgcagaaagtgagagttatccaaccatcacatcttcaacgatcagcaagattgttgtgaaaaaagacaacaattcgtatacggttacgaataaaggaaagtcttctacaggctggtatgtccaggaagaggataacaagaaacaggaagcggattccacgcaggtgggaaccctgcaaagtaccgttgccggccttagttttgccggatattacaactacaactgtacggactggacagcatatggccttgagaagccgaaaatgaccctcacagtcgattataccgaagaagtggaagcagaatccacagacgacacagaaagcgattctgaggcaaatacgaacgatacagaagattccagtgaaacgaccacacaggcagtggacaaagaactggttctgtatgtgggaaatgtcaatgaaaccgatggaaattattacgtgagactgggcgattccagtgaacttcacggaatttcccaggcatctctggagacattactgaacggaaaagcatttgattactggaaaacatcgattgattcgatgacgatcagtgacctggatcatctggatgtgacctatcagggaaccacttatacactgaaacgggttgtaacagaagaaaaagtggagaaagataagagtgaagacacagacaatgatgcagatgatgatacagatgcggacagcgaggacgcagatgacgaagaagagacgaagaccgtgaccacttactatgtgaatgatcaggaagcagacagtgataacttcaccgcgttctaccgggcagcagcagctatggtatgccagagccgtctggaagaaaatacgacaaaagatgatgcggaacttacactttcttatcacggaacggacggaagtaagattacaatctcctatacgccaagagattccagtttttatgtgatggaagatcaggatggaaactgcggtctggttaataaaatgaatgtaaaagatctgatcgatacgttcctgacactgaccgaaggtgaaaaatagttgtaacaaaacataaaataaaaaaagaaaccggatggtttctttttttattgcgttgcatatcaatagttggtccggtggaccgattttgattgaactgatttaactgataatacgactcatgttctttactgcgctttcaatcagtgcatttgcgttattgacataaataacatcttgaatattgttatcttttacaagatcgaccaggttgccactgaagtaacggtagtcgacaacgtgtacggtctggtaactgttgaccaggaatggtacgaaagcgttaccgtaagattccttgataactacgcaggatgatccgtcggtgatgttcgggttatcgatgcgttcgtacggctgatcaccgcagatgaagcacagatatttgttggcttcggagtacttcgttacatctgagactacatatcccgatacctgttgtccatctgtattggtgtaagtcagatcgttgcaggtcggtgtgtaggcaacaaccgtatccggattatttttcagtgtttcagactgattactgtactgatagaaggaaccgacgaatcccggatattcgctcttcgtgaaatcggtcagaggagaaggcgtcatgcctttggctttcatcagctctttgtaagcatagtaggcaccgtcagcggtccagtgatggtccgtcttaaagtaaagatattcactgttatgattctttaaggcatccagaacagctacctggttgatggaagcatccagatgtccgtttacataagcgaatgtgtcttcctggctgttggagccgactttctgctgattttcctgatcgatattgactgcgatactggtaggaaccagaatatcataaatggttgcgatatcttttaactgggtggcagcagagttcatcatgttgatgtaagcgtctgccccggcccggctgaagccgtaaagttcgaaacctcggttatcagcgatatagatttttcccagtctttcaggctcggcatggatggttccatcttcttcctgaatgtcatcttcttccggtgttggcgtcggggtggtttccatctcggcatccgcgtcaggaatttcatcaccctgtgcagcatcaccatagatttcctgtgtcgtaataccatagaattttttcatcttggcattggcgctcatcagtgtctcacggaacggaaacgtatccgcgtaccaggtgctgatatcggagaaaaattcgccgtttaacacggtagaaacagttggtttcgggaatttggaaagttcacgcttctccagttccgattctttcggtctaagaggaagcagaagtccgataaaagcgatcacaaaaaggaacacgaagaaggttcggattccgatctgccagaatcgcttgtggacggcattgtttttattaataaatttttcttttttatttgtattcatgttcagacagatcctttaaaactggaagtataaaaatggattgtaactgtttccgaccagcgcaaggagtgaaagaatcagcaatacaggaggtattacaatctcatatgcgtaggtcagataaggaatccggtaatgcacaaggtcaagtcgtttgatgtaagtgcctatatttttcagcaacggtgtggaagcgatgatacagaaaatcagcagatacagattattctggaaaagaacagaggtcgaaagatcgataaaaccgttgtggttcagaccaaacattcctttcaagatagctccaagattacccagagattcacagcggaacagcacccatccgaagtaaaccacgaccatggcatacagatggctcacaaagcgcggaaggcgggaaaacttttccagaaggaaggtgttctccatgtagatgaacaggaagaaatacagtccccagaaaataaagttccagctggctccgtgccagaatccggtaagtccccagacaattaacaggttgatggtacgtctgcgggcaccttttcgattaccaccgagcggaatatagacataatcacggaagaaggttccgagggaaatatgccatctgttccagaactctttaatggaaccggagatgtacgggtaattaaagttctcgtcatagtgaaaaccgaccataagccccataccgattgccatatcggaataggcagaaaaatcaagataaatctgcaatgcatagaacaacataccaatccacagaccggctgcaggaatctcggcgatgtctttggcgagtgttggaaccagggtatctgctacagatgcacagccgtttgccagaatagcttttttggcaagcccaatggtaaaacgtttgatacccctgtataattcatccgttttcactttacggttctcaatctcatcagcaaccagctggtaacgaacgattggtccggcgatacactgatggaacagggaagcatacagcagcagatttacgaatttgcgctgtggtgccacttcctcgcgatatacgtcgatgacgtaagagagcagctggaaagtgtagaaagaaataccgattggcagagcaatctgaggaatttcttttggaaaatggaagatcgtgtttgtgatggatgaaaagaaggtcagatatttgaaaatacaaagcagacctaacataaatacgcagtcacagatcaaaaatattttactcagtccttcttcccggtactgatcaatcaataaggcgaacagccaggaggcaaagaccatgctgagcagaagcagaagatatttcggtcctccccaggagtaaaacaccagagaaaaaccgaggagaaccatatttttccgcttaataccatcagcaaaatgataggcgatcagatttaacgccagaaagaaaaaaacaaaaaataagctcgaaaaaaccataaaactccttttgtatttgcagatgtaagcataatgaaattgtgtgcagaaaaaaattctgcgctgggttagcgggtaagattttcagatcgtttaagaaaggcatatacattcttgataccgtctgtcgggcactgttttgcatggaaaatcgtgtgtaaatgatataagtaatcagtaaaatagatatcagttgaatgtaaaaacatatgtatctatgccatgatgcgacgaaattccacataaaccaacaaaaaagtgctgtacctattataatataataacagtgtaagcatgtcaacaaaataacgggtgaaaaagatgggaaaaccgttgattttaaagggattttggaacgttagaagattgaaaaaatatcgacagaaaaaattaaaaattggcagggaatgtggtaaaaacaaaaatattatgtaaactttcaggaaaatataaaatgaaagcagtgaaaacgacagaaaagcaagaataccttttcgaatattcttgctttttctttaaaaatagtatatcgttttcgaaataactgtatcattcgcgtaggatacagttatttacgaaacaatatactggatattttagcattggacaatagaatttatgaggcaaaaaagatgttaacagcttccagtacctgttcgggtgcttctatctgaggcaggtgtttggtgctttttatcatctcggattcgattgcgggattaatagaagtatataaagcaacactttctctgacacggggttcagaatcaccctccagaatatagatactgttgtcaatggtcttcaatgcgtgactgatattacagtaaatatacttcccggtaatgctcgcgagcaagtactttccggcaccattttccagatgcgaggactcataatagagatcttccagttctgtatccacatgaaatgggttatgaagatacttttcggtaaatgccagatcaatatttggacgggaattcagaatgttataaaccaaagtaccgatcagaggaagttcaagcagaaatttagatgctttggattgtctgtcaggaatctgattcaacactgcgagatcttccgggttgatcatcatgattcggcggataatggatgaatcatttttgcatgccatgacagcaaaagaaccggataatccactggtcagtacatccgttggctgtttgatgacagctttgataaaatcggtgatcaactgaacataaagaaagtttgtataagtgattttcggacgatcagaacatccacagcccaacagatccatgcagtatactgtatgatcttttgcgagctgctttttgagaaatttccattcgacagagctgcttgcaggggaaagatcatgtaaaagtaacagtggagaaccggaaccttcaatcgtgtaatgaatacgtccaaacttccagtcgtagaaatactgagatttattatgcaacgcattgcggattacagcggaagcgttgatcagtttatttatagcaaaaataccagcaccagtcatagaagtcagaatgctgattgttagtaagcgctgaacatttttcttcatgatagattacctccttgtttgaatggcaattgttatatctattataattcatacggagaaaagatacaaacattttttaaatctcttagtggaaaagcagatgatttatagctgtttacaggtaatgtcgggagagaccttttaattaaatatgtcgtaactgttcagtaccttcacagttacgagccaaaatgcatttaaacgataaaaacacgctttgcgagtttttatcgttatcgcggcactcctcaaggttccgtgcaagcacggactttgactcgttgctcgcgtaaatcaccttcggtgatggcattttggcttgtatgtctcgggattttgacatattcatgtcaaaacacctcgcgggacagtggctactgaatagttacaatatgtcaaaattcagagatatacgatacaaaagtctgctattaaagaggattgagttgacaacaaaattttattcaggtggaagcaaaaagagcgaatagtaactatgtttcacgtgaaacattcaaaaatagcagaattttatgaagagataacagcctatatgtttcacgtgaaacattcaggaaataagtcgtagctgttcaacacttttacagttacgatagcactactggatattaaataattaaaaagattcacgcatgtaataaaatacttcaaataaaaaatataataatatgatgttatggtcgaaaagtattttaccccctttgatactgaattattccgcacttcgcattttcataattaacaaaaatattcacaattcgttcgttcttttgaaaataactacttactcatacttttggcgaaccctatgttcaaaaatttttccacaagtaaatccacatcaaatctaagaacttatggccctggcatcataatattactaaaacagaaacaggaaacgaatgctttttgtataaaaaagaaaaaaatgtttcacgtgaaacgttttgtgtggaataatagaaaatcaagtgatataatagaaccagcaattgatgtatataaaataaatcttaaaacagttgcacgtaaattaaaattgtacagaaaaatacagatgaaaacgaactggaaggagtacagttatgggaagagcaatagcaattgcaaatcagaagggtggcgtgggaaaatccacgacagcgattaatttatcctcctgccttggtgccatgggccagaaggttttgacaatagatctggatccacagggaaatacaaccagtggtctgggggtagagaaggatgcggcagagaatacagtatatgaattgttacttggtgagtgtgaagtagaagaatgtctgcagaaattggaattcgaaggagtgtctttaattccttccaatgtcaatttagcgggagcggagattgaactgattggtattgaagataaagaatatatattacagaataaaatcagcaagatccgagatcagtttgattttattatcattgactgtccgccatcattgaatatgttgaccatcaacgcaatgacaactgcaaataccgttctggtaccgattcagtgtgaatattacgcactggaaggactttctcaattgatgcacacaatcgaactggtgcaggaaagactgaatccggatctggaaatggaaggtgttgtatttactatgtatgatgcgagaactaatctttctttacaggtagtagaaaatgttaagaataatctgaatcagacaatctataaaactattattccgagaaatgtacgtctggcagaagcaccaagtcatggactcccgattaattactatgatgcaagatccacaggagcagaaagttatcagctgttagcagaagaagtgatacacaggggggatgaagaatggcagtgaaaaaaggtggccttggaaaaggattggattctttgattccatccggagctccgaaaaataagaaaaatataacagaagaaaaaaaacaaccggtaaaagtagtagaaaaagtagtggaaaagatcgttgagaaaccggttgaaatgaagatgaaaatcacagaagtagagcctaatagagaacagccaagaaaaaattttgatgaagatgctcttctagaactggcagaatctatcaaacagtttggtgttttgcaaccactgctggttcagaaaaaggatgattactatgaaattattgccggggaacgcagatggcgagctgcaaaactggcagggttgaaagaagtacctgttattatcaaagatttttcagatcaggaagttgtagaaattgcactgattgagaatattcagagagaagatctgaatgcaattgaagaagcggttgcctataaacggttgatggaagaattccatctgaaacaggatgaaattgcagagagagtatccaaaagcagaactgcggttacgaatgcgatgcgattgttgaaactggatgagagagtgcaggatatgctgattcaggatatgatttctccgggacatgcaagaacacttctgggaatcgaagacaaagaccagcaatataatctggcgatgcgaatttttgatgaaaaactgagtgtcagagatacagaaaaaatcgtgaaagatctgcaaaaaccaaaaaaagaagaaaagaaaaaagaagcagatccgcagatggaagtaatctatcagcaactggaagaacgaataaaatcgatcgtgggaaccaaggtggcgatccagcacaagaataagaataagggtaaaatagagattgagtattattctcaggctgaactggaacgactgattgatctgttcgaatccataaaggaatcttgaaaaacgtccgctaagaaataagtgcaaggagcataagaaggatacttgtaactgttcagtaccctcacggttacgagtcaaaatgcatttctaatcaccttcggtgaaggcattttgacataaaacatgcaaaaacacctcgcggaatgccacctactgaataggtacggagaatcattttggtagtggcagctgataaatagaaagggtagattgacacatgaataatttttttgatgcaataggtattgacctgggaattctggtagtcatgcttatggtattagtactggtattgattgtactggtgttaaatgtttctctgggactgcaccggcagagacgtcgttacaatatgtttatgaaaggcgcggatggacaaagcctggagagagtattttctcaaaaattaaaagaagtagacaggctttcaagagcaaacgaacagagccttgaagaagtcaggggactgaaggatatgttatccaagtccctgacaaaatacgggatcgtaaaatacgatgctttcgatgacgtaggaggaaaactgagttttgcaatcgctcttctggatatgaacaataccggatttatcctgaatgcaattcacagcagagataactgtttcttctatattaaagaaatagtaaaaggagagtcctacattctgctcagttcagaggaaatggatgccttgcgtcaggcagtacattttggagagaataaggttcgataagagaaaaaaagattgcagaaggcagatggaacgaaaaaagtttcatctgcttttttggtcacgggataacgaggcaaagcctatcctgtgaaagaattgtatttatccaagaaccgcgtgaatcccacttgaaaaaaaggcaatactattataaaataaagagaatgattacttattataataaagaacaagaatagtaacctgaaagagggaggaaaatatgttagatattaagtttgtccgggaaaatccggatgtggttaaagaaaatattcgtaaaaaattccaggatcagaaaatcccgatggttgatgaagtcatcgctctggatcaggaaaacagaaatattaagcaggaagtagaatccctgcgtgcaaataaaaacaaaatcagtaaacagatcggtgcactgatggcacagggtaaaaaagaagaagcagaagaagtgaagaaagaagttgcagcttccggtgcaaaaattgatgaactgtctgcaagagaaaaagaagtagaagaaaaaatcaaaacaatcatgatgacaatcccgaatatcatcgacccttctgtcccggttggaaaagatgacagtgagaacgtagagatcgaacgtttcggcgagccggttgttccggattatgaagttccgtatcatgcggagatcatggaatctttcgatgggctggatctggacagtgcgagaaaagtggcaggtaatggtttctattatctgatgggagacatcgcaagaatccactccgcagttatctcttacgcaagagattttatgatcaacaaaggatttacttactgtgtaccacctttcatgatccgaagcgatgtagttaccggtgttatgagttttgctgagatggatgccatgatgtataaaatcgaaggcgaagatctgtatctgatcggaaccagcgaacattccatgattggtaaattcatcgataccattctgccggaagatacgctgccgagaactctgacaagctattctccttgcttcagaaaagaaaaaggtgcacatggtctggaagagagaggtgtatatcgtatccatcagtttgaaaaacaggaaatgattgttgtctgcaaaccggaggacagcaagatgtggtttgataaactgtggcagaacactgttgagctgttccgtaccctggatatcccggttcgtactctggaatgctgctccggtgacctggctgatctgaaagtaaaatccatcgatgtagaggcatggtctccaagacagaagaaatacttcgaagtaggaagctgctccaacctgggtgatgcacaggcaagaagactgaaaatccgtgtaaatggtgaaaatggtaagtatttcgcacatactttgaataatactgtagttgcgccgccgagaatgctgattgccttcctggaaaataacctgaatgcagacggaagtgtaaatatcccgaaagcactgcagccatatatgggtggaatcgaaaaaatcgtaccgaaacataaataagagatggaatgcaagtcaaaatgtcatcatcgaaggtgattagaaatgcattctgactcgcaactgtgaggatactgaacagttacgatggaataataaaaagacagcggctgttacggacaccagatatccgaagaacaatggatatctggtgttggcatgcggagaaaagttaccgggtcattcctgtgatgcggtaacagaaaatggataataagaaaggaggaagactgtatgcacagttatcttcgggctataggattttcaaaactggagcagaaagatctggatcagatcctgcaagaggtgattgtttcctgcgatgagaaaaagatcgcagagcagggaaaaaacgagatctttgcggaattatcccgatattttggtatgaatatcggactgcgtgtctgtggaacttatgatgagcaggatcagtttcggatggaatattattttccgtattttgccggaagcggtatcaccagtcaggaagatgtgatggtagaacaacgttctgaaaaagtctgtttttccggagcgtgtgacgatgtgcgtgtgggtgtgactctgatcttttatctggcaaatgcaggagaatatctgacagaacgtaccaaggggacaccgggggaaggtttcagcaacctgaccttatccggtctttctacggagggcaagattttgttgccaattcaaaaaaatattgcccagagagaacgggatcagcagctgacccggaaaagaacgcagatgatctacgaagcacgccggggaaatgaagaagcgatggaaaatctgactatggatgatatggatacgtatgccatgatttcaagaagaatcgctaacgaagatattttttctattgtagatacgtattttatgccttatggtatggagtgcgaccggtataatgtaatgggagagattcttgaatggatggaaaccacgaacaaactgaccggcgagaagctgtatcagatgacaatcaactgcaacgacctgattttcgatatctgtatgaaccaggaagatctgatgggaatcccggaagttggtcgaagattcaagggaattatctggttgcagggaagcctgaatttttaaggttgtcatttcaggtattctatagtagaataaatatatctgtgaaggtagcgaacagttaccgaaataatctgtagattgacaactcgaaaaagagttgataatcttatatatggccgaagggaaaatcccagaaacccagtaaaatcaagggtttgcggcatgtgtcgtcatagctcagctggatagagcactcgcctcctaaggttgcgttacaacggccacctcaaaaaaaactaaataagggattgcagttcgactttgatcgggctataatcatatatcagacacgtccatatagctcagctggatagagcacacgcctcctaagagaaagccgaggcattccccaaagggaaaaaatgaaaaacaactttcagttcgaatctattctgaaaaatgctaatggtgacaacaaagcattcccaaaattggggaacgttctaatgttaccaaatcaaaaaaatctgtagattgacaactcgaaaaagagttgataatcttatatatggccgaagggaaaaatcccagaaacccagtaaaatcaagggtttgcggcatgtgtcgtcatagctcagctggatagagcactcgcctcctaagcgaggggtcggaggttcaaatcctcttggcgacgggcttcaaagcgttcgaaaatgttagctggattagctgacaacgaacgcttttgttattttcaaatcacgttcgtgacacaaaattccattcaaaatgatcaatttccagctaacgcaatccgatttttgttagctgacagctaatcaaaattaccggtttgcaaacatgggttttaagaagtccagctaacatttgggttccgctccgttgtcaccccttattcggggatgtaaatcagagaaaaggcgggaaaagaaacaatctctcccaaacctgcaaacatgaattagctgaaacagtatttaattctattagctacagctaatggtcaaacagcaatgtctgtttggaactttactatctataaaagttccaggcaggcattttttattttctgaatcctggaggaaaggagtcaagatgactgagccaaacagacaatcaggagaaaacgaagaaagaatcatagaaattgagattgagcgtcttcgtccgttcaaagagcacccgtttcaagtaaaagatgataaggaaatgtttcttctgcaggaaagcattgagaagtatggaattttaaatccgctaatcgtcagaccagtaccggatggatactatgagatcatatccggtcacagaagaaaacatgctgcggagaaactgggataccgtaaagtaccagtaatcatccgggtattaagtgaagatgattccattttaagcatggtagattctaatcttcacagagaacggatcagctacagtgaaaaagcttttgcttacaaactgaagaatgacgtattaaaaagaaaaagtggtcgaaaaaagagccaagttgaccacaaaacaccaagaaagcgggcaatagaaatcatcagtgaagattgtggtgatagcccaaaacaagtgcagcgttatatctcactgacaaaactgataccggaaatgctgcagaaactggatgatgagatcatttctttttgtccggctgtagagatagctgcattaagtgaaaaagagcaaaaggaactgcttgtagcaatggagtatgcacaggcaatcccatcactctcacaggcccagaggatccggcaaatgagtaaagaaaagcagttgtcactggaaaagatggaagaaatcatgtgtgaggttaaaaagggtgaaatcacaagagtggctttcacaaacgaacagctacataagtattttccgaattcctatacaccggcaatgatgaagcgggaaatactggcactgttgaaattatggaaaaaagaatcatgggaaagttaaaggaggaagaaatcatgtgtaaagttatatccgtagtaaaccagaaaggcggcgttggaaagaccaccacaaccgtaaatgtaggcattggactggcaagagaaggtaagaaagtgttgctgattgacgcggatccacagggaagtttaacagcaagtcttggatatgaggaaccggatgatcttcgcatcacactggcaacgatcatgatggatgtcatcaacgaagaagaaatctctctggaagatggtatcttacatcaccaggaaaatgtagatctacttccggcaaatattgagctttctgccctggaagtaacgatgggaaatgttatgagcagagaaatgatcatgaaggaatatatcgatgcgataagatgccgatacgattatatcctgatcgactgtatgccaagccttggtatgatgacaatcaatgcactggtctcctctgattctgtgctgatacctgtacaggccgcatatctgcctgttaaaggacttcagcagctgatcaagaccattcttacagtaaagaaaagactgaaccggaaactggcgattgagggcattctcctgactatggtagatttcagaaccaattacgcaagagacattgcatcgagagtacatacaacctacggaagccagattgaagtatttgaaaatgtgatcccgatgtctgtaaaagcagctgagaccagtgcagagggaaaaagtatttacatgcactgtccgaaaggaaaagttgccgaggcatatatgaaattgacacaggaggttttgagtaatgaaaaatagaagtggcgaaaagattaaactggcaagtattgatgaactgcttggtgtggtaaatgaagagtcagcaatggagatagaaattagtaagatccatccgtttaagaatcatccgttcaaggtgctggatgatgaaaagatgcaggatctggttgaaagtgtaaagatcaatggagtactgactccggtactgcttcgcatttccaagaagtaatacattaacaaagtatttctctttctttctggaagtttcttcaaggcttctgccagctcatcatcaaggacacgaatatcaatgccacatactgaaaagattgtataatctgtttcgtaatcgtcccacacagcaaaattttcaacgaaaatttctggaagttcacaaaatggaatttctttatcttttcgtcgtttcaatccttgctggtagtcctttacaacatgacggacaactttcttcaaacaactttcaaagcgacattgaactgttttctggaagtcagacggtttcatcaatctcaccccctttcctctatgatttgaaaagcgtttatccctctttccgcaccatatagggaatgaaaggtgtgatttaatgacctcttttgaaaaaatttaatttttttcaggtatgaaaaaagcccgtacaaaacatatagttctatacgagctttaaatgtcttattaaatttattttttgatgtactgttgttagttggtgtttgagtgtatatggttgtacttaggcgtatggaaagacggcttgctggtgcggttactgctggtggtgttgctggtgcggtggctggaagtgccgttgctggcaaaagagctgaaagaaaaaatacagcttctaaagaaaatcggggcaataccacttccagcatgggacagcgtgcaggctcaaaggtgggtgctgtcttagatacgaaaaataaagtgaaagacaaggcaaatgctgtcaaagaaaacatcaaggatatgccgacacagaccgcttatgcggtgtattccgcaaaggaaaaggcaaagtccagcgtgtccgacttcaagcgtggcatggtgcaggaacagcagtccagacagacgggacgattggaaaagcaggaacagcataggcagaatatcgctgacaagcgtatggagcttcaaaaggcacaagaagcaaggcaggcacagcgaaaggctgacggatcagcgacaacgggagctacccgtccccatgagcgaccagccacagcttcaagcgtttcaaagacgggtgctgaaaaaatgcaggaagtcaaacgtcctgccacagcgaccacttcaaagataagtgagccagtcaaagcaaatgttatcaaagagcgtccgctatcttctggtgcttctgataagaaagcgacccagtcggcacagccagtacataggcagaatgtagaaaaagtggtatcgcaggaaacacgccagaattacaccaaagaccgcaggacaaaggttcagcagacgcagagcgtccagaagaaccagcagaccacagagaaaacccgtaaccttgtaacgaagaaaggacagaagaaaaaatgaaactgaaacatatcgctatcattggcagtctgtttcctatcctcttttctctggtgcttttctttggtgtcttgattagtgcggacagcgacgacgagaacagcaacttttcttctggtattacaagtatgaacctatccgcagaagtcttgaaacatcagcctatggtggaaaaatatgccagagaatacggcatttccgagtatgtcaatgtgctattggctatcattcaagtagaaagtggcggtacggcagaagatgttatgcagagttcggaaagtctgggattaccgcctaattccttagatacggaaagctcaatcaagcaggggtgtaagtattttgcgtccctgctttcttcctgcaaaaatcaaggtatcgacgatttgaatgtagcgatacagtcctataactatggcggtggctatgtgggatatgtggcaggaaagggaaaaaagcacacttttaatctagcagagagcttcgcccgtgagaaatcgggtggaaagaaagtaacctataccaatccgatagctgttgcaaagaacgggggctggcggtatggctatggaaatatgttctatgtggaattagtcaatcaatatctgaccgtggcacactttgataatgcgacggcacaagcgattatgaatgaagcgttgaaatatcaaggctggaagtatgtgtatggtggcagtaaccccaacacttcctttgattgtagcggacttgtgcaatggtgctatggaaaagctggtatctccttaccgagaaccgcacaagcacagtatgacgctacccaacatcttccactctcgcaggcaaaggctggggacttggtatttttccattccacttataacgctggaagttatgtaacacacgtcggtatctatgtaggaaataatcagatgtaccatgcaggcgacccgataggatatgcagacctaagcagtagttactggcaacagcacttaatcggtgcaggacgagtaaaacaatagaaagtgtctgaaaataattaagtttgacaatatgagaataaagtatgacattttcataaaaaagtgtgacaacatttatcacaacgaatgattaataaaaaagtatgacaaccacaaagcaaaaatcataaaaaagcctgacaatattaggataaataccataggtggcaatgtcataaatcagaacgtggaatcgtcacgctgaccagcttggagtgcagagcatttcaggcttttctattgtcaaactattttatcacaaaggcacttgtaaatgtaagactttattatgaaaggacagaaaggacttgaaaaatatgtttaagaagaataagaaacagacagaaactctcaaagaaccaaaagaaaaaaaggtgcgtactgttaaggtaggcacacataagaaaaccgtgattgcgttgtgggtggtgcttatcgcaagcgtgagctttggagtgtataagaattttacggctatcgaccagcacacgacccatgaaaaagaaatcattgaacttcgcttgcaggacaccaacgggatagaaaatttcgtgaaaaactttgcgaagtcctattacacatggaataacagcaaagaagcgattgaagcaaggacgcaggcaatcaacggttatctgacaaaggaattgcaagacttgaatgttgatacaatcagaacggatataccgaccagctccacagttacagatgtgattgtatggagtatcgaacagtcgggaacggacactttttctgctacctacgaagtagatcagcagataaaagagggagaacagacaagcaatgtgaaagcaacctatattgtaaaagtccatgtggacgctgacggggatatggtaatcgttcagaaccctacccttgcaccagcaatcgaaaaatcggactatgagccaaagacaccagaaccagacgcaagcgtggacgctgataccgtaaacgacgctaccgcatttctggaaacattctttaagctctatccaacagctacggaaaaagagcttgcttactatgtatctggaaatgtgattgagcctatcggcagggactatctttattctgaactggtaaaccctatctttacaaaggacggggacaatgtggaagtcaaggtagccgtgaaattccttgatattcagacaaaagcgacgcaggtatcacagtacgagcttgtgttacaaaaggatagtaactggaagattgtaggataaatgatataaaaagaccgtagtctgtaacacacatttatgtgccttacagctacggttatttttgaaattgattgcgtatatccttgtctttacgaaacgctattttagcagacttcattaaatctactaagaaacgtacttcgtattcatcacagtctgaaaaaatatcttttgcttctttttcaaaaacgattttagaagcaatcacattatcgcataaaagagtatcgactgatacagaaagtgcattggcaatcgcaatcaaggttggtaaactgacttttgtttttcctgtttctacattactcatgtgagctggtgtaatgtctataaggtcggcaacggtttcttgtgttacgccctttttaattcttgcaattttaatccgctgtccgattgctttgtaatcaacttccacagtttcctctcctttcctgcttttttatattgtaaccattcgcagagtgtaatataatactctgtgtaaatgaacaattctttcagtatatattcaggctaaaaagtttaaaatatggaagaatataaatgcaaaggggggtatgtctatatgttaagatttcgtaaaaaggatagcaaagagcttataaaaagaatggctaaaacaaatggctgttcggtatctgaaattcgcagagaaatgcagtatgccattgatgaagctagaaatagtgatgacccaaacaagcaagcggaatttcaacgcttatttggaaataagatacccagtccagaagaatttatttgtgtagttagcaagaatttaaaattttagtaaatacggagcgtgaacaatgaaaaaatcagaaacgcaggaacaggaatttttagaagtttgttcttcttacgaccatgaccttttaactggaaaaagagaaatgacattgaaagactatgaacgaattacttatttagttagttctcttggcggaaatattcatgttgttgtgtgcaggcaagaactttttacaaaaatcagcattgaggatacaggaaaaggtattgcaccagagcgacaagcgactatttttactcggttctatcgagaaccagaggtacatgataaagagggaatcggtattggcttatatttagctagagaaatcatcacgctacaaaatggatatattgaagtacagtcacaaattggacaaggaagcaagtttataatatatcttccaaatcgggattaagaaaaatcacagttttgtgattttttctttttgtgactggtttgtgatttttatgctttatcatgtaagtcaggaggtgaaatcatgagaatcaaaaaatcgacggtatttctgacaatgttcgttttattattggcttttaccggttgccagaatgaaagctccagtactgacgaaaataaacaaacgaagagcacagcaagtgataaggttatttataaccaaaaagacttgcaaaaccctcaaaaattagaaatttcagaagatggaactgttgaaatggaaataaagagtatgactgaaccagataatattctcccagaaaataaatctatttttctttctattacatcaaagaaagatacagatgtttctttgcaatatacttatgatacatatggaaaagagggggcattgttttgttgcgaattaaaagaaaagaatggtgttaaaactacattagagcctttatcttctttctacttgtctcaaacttctgaagaaaactacaaagaaacatggttgacaaatggcgtgtttttgaaaaaaggggaaaatgtgttttatttgaatggtaaagaccaaacatttccttatcgtatgatacttaaagtaactttttttgaaccagaaaagatagatagcgttattctttatccgatagaaaaataaggaggacttgattatgaaaaatgtgattgtcaaaacacaggctttaaaaaaatattaccaaacagggaatcagaccgtaagagcattagatggtgtgaattttgaagttgctgaacgagaatttgtttctatcgtcggaaaatcaggtagtggaaaaagtacgcttctacatatgattggtggattagatacgcccagcagtggaactgttattgttgatggactaaatcttgaaacattaaattcggaacaacttgctcttttcagaagaagaaaagtaggatttatttttcagcagtataatctaatacccgacttgaatgtgtatgataatattacttttcctcttgagttagatggtacgcaaattgataaagattttattcaggaactattggaaacattaaatatctcggataaacaagaaatgctccctgcaatgttgtctggtggagaacaacagcgtgtagcgattatacgagctttagcaacaaaacctgcgattatccttgcagacgagccaacaggaaatcttgatacttctaccagtcatgatgtaatcggattattgaaaatgttaagtagacaatatcaacaaacattgattgtaattacacatgataatgatattgcacaaatggcggacagaattgttcagattgaggacggaaaaatatcaactaaaggaagtgatttccatgttagcgaataataatgaggcaatcatcaataaacttgcaaaaaacagcgttaaaacaaataagaagcaatatgcaattttgtttttcacaataatattatctgcatttatgcttttctgtgtatttacaatcggtatgacttatctgaattcgagtagattgcagaacacacgcttaaatggagctgaatatgatattgtaactatgaacggttttacatcagagcaacttaatactttacagcaaaacgagaatatacggagcgtaggtatagaatcctatgctggatttatccaaagtacagagtacgataagactgttgaaattggattgttatggtgtgatgaagtattctgggataatttgatgtcgcctgccagaacaaaattagatggacactatccgcaaaataaaaatgaattgatggttacaaaagatattttgaaaacctgtggaaatgaaaatctgtctgtcggagatagtcttattttaacttatgaaaataatacaggtgtttatacagacgaatttgttatcagtggtatatgggacggttatggagatacatctgctggatttgtgtcaaaagccttttatgacgaaacgggatatgatttaaaaaataatggaatcctttgcataaaactgaactgtaactatgtttttccaactacaatacagtccatagaaaaatctttagatttctcagacaggcaaatctttgcaccgacaggttatatcgaaaattcttttaagttattgcttggtatatgcggtctggctcttgttatatgtttaagtgcctatcttctgatttacaatattttgtatctgtctgtttcaggaaagatacgatattatggattgcttcaatctctgggtatgacaaagaaacagcttgttcgtttcataattaagcaaatgatacttgtcggaatattaggtatatttatcggaaatctgttgggtattattttatgtatgaaattagttccttatattctcggaatattaggtatatcgactggaaatatgacattgcagtttaatccagtgattttaattgtaagtattgttgtgactattttttctattattctgggaatgaaaaagccgattcaaattgcaacaaaagttacaccggtagaagctacaaaatatagagaatgtatatcgaatggtaaaaggtataaaaagaaaaaaggggctttcttctggagaatggcatttgaacaatttaagaaagataaaaagaaaacagttgttgtcttactatcgctggcaacaagtttatctgtattttattgccttacaacgatcataagtagtcagggagaaagaacggtactgcctaactactggaacgccgattttattgttcaaaaccagacacaaaccacagaggatataaattctcttaaaccagctatagaggattcttttgttgaagaaataagaaagctggacggcattaaagacttccatcttgtagagggaacacctattattttcccgtatgtgttaaacagtttttctgatatgtggataacgaattatatagacagaacaccttatttatcttctgaagatgttaaagcagattataaagcgaatccatcaaactattatggtatgctaatcggtattgatgaagaacaatttgattatgtaaatcaatcactggataatcctattgataaacaagattttctgaatggagaaagttgtattgtgcaatatgaaggctctgaaataccaaaagaatatttgaatcagcgagttttctttaatcttcaaggaaagcaatatgaaattaccgttgaagctgtgtcgtatgacacacagtacagcggaagagatataggtgcttcgttgattgtaagtcaagactatttaaatagcctgatttctaagccgacaacattaaatatgtatatttactataatcaaaaatatgacgaagtgttagaaaaaaagattacatctcttgtagaggatagtccatatagtaatgacttacacattgaatctcaatttgagaatatgagaacaattcaagaatcgcagggagaaatgatggaaataggcacaataatcgctttattgcttctgctggttggagtcttaaattatacaaatacaatcgcaagcagtattcagaatcgaaaattaacattttctgttatggaaagtattggaatgtccaaaaaacagataaatcaactgttaattcgagagggggttttatatgcacttttctctgtatttattacattgacgattggttcagttatcacttatatttgctttgaatccatgaattatatggagattccatttaatgtaccagtgtttcctttattcagtgctattattcttgtcatgctgatatgtatgataacacctcttctatcctataaaaaacttgcaggaaatcgctctatcgtagaacgattaagagattatgaatagctttaagattgcaatggatatcgtagcaaagcatgtggatgaccatattggaatcctggatgaattctcttacagagagcagctatgggatcataaaccattaagtgacttctggaggattggatcccggaccgaaaaaaaactggccggttacgggatccatacgatgggcgatatcgcaatggcttctttaagatccgaagactggctgtataagatgtttgggattgatgcagagctgttgatcgatcatgcatggggttatgaaacatgccggatgagtgacatcaagaactatcattctgaggaacacagcctatcgaatggccaggtgctgatgcgaaattattcttttgacgaagcactcgtgattgtaagggaaatgacagacaacctggtcctggatctgtttgaaaagggactggtgacaagttctatcaccttatggattgcatacgaccacaggtatgagcatgaggcatccaaaggaacagtaaaacttgaaagaggaagtaacagttccaaaaaaatcatagatgcagtggcagatttatatctcaggattgcagacaaatataccggaatccgaagaatcgaggtgtgtgcgaacagggttgctcctgaaagttatgtgcagtacagcctgtttgatgatcccaaacagaccgataaggaacggcatttacaggaagcagtattgaatgtaaagcagcgttatggaaagaatgcgatcatgcgtggatccaatctgctggagtgttccacctatagagaacgcaatgaacagattggtggtcaccgtgcttagaggaggtgcaaaaagtgctggcaagtgcatatcaaccgtatttatatttaccaagaccggtttccaggaggcatcccatggatgtaggacgcagggcaaaacagtttgctccatttgcggcacttcgtggactggatgaaacgatccggcaacaggaaatcatttatgaaccaaaaagagatttatctgaggaaaagaaaaatgagctggatatgaaattaagaatcctggcatatggaatgaagatacaggcaacttattttcaaaagtcatggaagaatccattaattggtcagtaccatacattatctggaaccgtagaattttttgatccatcagtccacttacggattgatgataccgagattcagatccaggacatctgtgatctgactggtgatatatttgaaactattgaaatatcatgttaattaatcacagcggaattttttataccggaaagagtgagtggtagctggtgaaaggataaaaaaggatgcacagatcgacaaagcagatctgatcagaatagaaatcgtgctgttcgtgtagctttggcacttacggaatggatggcatgatgctcataaggcggatttgatttccctttggtccgttgagtaataaatggagaaatatcttattgcttaaaggaggaagcctatatgggatcaggtgctattaaatggcatgtacactgctctgtatgtggagcatttattgaaaagagcgcacaaagcgattcagaagtggagtgcaaaaaatgtcgcagtacattggagatatttgtaaaggatgatatggtgtcggttcgtccgatccacatccgagatgaacaattaaagtccaggatgcggacgtattcccgaaagatgatgaatcagggatcataacagaatagaatgagctgtctgtagtaagtgttggatttggcaggaaccatcaagaacgcaccagatagcaagagtttgtcaaggagctgaacctgactggaatcactaagagcccggcaaaacatttacggatacactgcaagatcagaagtattttctggttttggagattgttgaagtatttgttttgtcgggcttttttgatgtatttcaaaaaatttttaaattttttgtcgtaccccactgtaaaacaggctctcagcgtttcgttatatagaggttgaattctcttctgcaaaaataattgcagagagagattttgataatatgacacaaaggaggaagcaaagatgactgaaatcgaataccaggaatttgtaaggcattgtccttacgatgctatgggcgattattccatgtttcgcaaagagcaaacagagaatgaatcagaagatgcacatatcaactgaataagccaggcaatctggcaaacttaatctaaacgcagatacatgcgttacaaaggagtcgcggactcccgttcaaaaaaaacgggtgagttcgtgacctcttgtactgcagttctttatgtctgtgcagaaatttcataaaagatggaatggaccacccggagccgaaaggcagaaaggtggtctttatgttgacattaaaagaactgaaaaaaatcgtgaaagttgctgatgtggagaagagaatcccaagcgtgaaatccttgaaggaacacaaagttgtagtaaaggaaatgatcaatgcagatacaacaatctctgtttatgatcacggatatgtactttatacagcaggaaatcaatcaaccgtatttccgcttcatagttgtgatgactatgaatatgtgagtgtaactggcgataacaaggaattcaataaagagttctttgataatgaaaactggtatatccgtctgctgatggaggctgaagaccgtatggcatacagccagagcaaaatcagcaccaatcatggtgtgttttctaacagcgatgttacagatgatgcggagattatgagaggatcttcaaaagattttgttgacgatgttatcgacagagaaattctaaacgctttgatcaaagagttaacagagagacaattcctataaggcagtctattatgtagaaccacagacaacggatcacccaacctaccagatcaatcgaaagatcgtggtaaaagaagcggatcaacagaaagattcgcagtcagaaagttcttctgatcaggatgctggttcttccgataagacagaaacagaggattctgaggctgactcgtctacagaggaaactgatgctgctgacacggagagcaaaacagaactgacagaaaaagaatttgatgcagagatcgaagcaacggaggatcaggagaccgttgatccggaaacagggatcacactctcagaggttatgcaggaagctgttgaccaggaagttgctcttgcagatcttgaagcaggcgaaagtattacttttgatatgccaatgatgcttgcttccggtgaaacaggaacaaaatcagtcacagttacagccggctcctggtactattacgcagactatggattaggttcttatctgacttgtccatattatgtgaaatggggaagcatcaatgcgacagcatactgtgttgaaccatcgaaaaaaggaccgggaaatggaacttatacgatccagaaacttgccgatggaaagacacttgcaaaggtctgctattacggaacaaaagcaagtgatgagaatggtttcttcgatgagaaacatccggattttccggcaggaaagagattcatcattacccatcttgcagcggcttatgcaaatggatccagtgactgggcatccggaaccaatgcgacaggaaagaacctggcaatggaactttataactattgtgtaaatatgccggacattccatctgtagatatgagcttttccgaatctaatgtaaaggcttatgtggaaggaaacagccagcgaacaagtgtgatcacattcaaagcagataaactgcagacgattacatttaagttgccaagtggtgtaaagcttgtaaatgtgtcaaccggtaaaacaagtgctgcaggagcaagtgtagaaatcagtggaggtacacagttttatctgacagcaccacttgatcaggcagagagcgtcagtgctacattttcttctcagatgaagggaagcattgataaagaatactctgcttacaagattgtaacaggatccggaacacaggatctggctcttgttttcggtgaaggtgtcggaaatgagaaatatgtggattttaaagtaacctggacaaaagaatgtaaggtatccattgtaaagaaagaccaggatacaggcaatgcactggctggtgcagtgtacgggatctattccgatgctgcatgtacaaagctgatcgcagagatgcctgaaactgatcagaatggtgcttcacagcttacaatggaaaagacacaggaagttgtttatctgaaagaaatctctgttccaacagggtatcagattgatacaaagtcttataatgtgactcttgctatcggaaagacaacgaccaaaaatgcaacggataagcgaacaaatgcaaagctcaacattgcaaaacaggatgctgagacaggcaatgaagcccagggagacgcaacactggaaggtgcggtatatggtctttatgcaagagaagacattgttcatccggatggaaaaaccggaacaatctataagaaagacaccctgatcacatccctgacaacggataagaatggcgaagcttctgtatcagatctctatcttggaaagtattatctgaaagagcttagtgctccggtggggtacgtactggatccgacagaacatgatgtggactgtacttacgaaggtgctactgttccgacagtagaaagaacttctgtatgtaaagaaacagtcattaagcagccgttccagatcattaaagccgcaaacaatggaaagaccgatgcagatcttctgcagggagtcggtttttcagcatggcttgtcagtgatctgaaagtaaaagcagatggaagttatgattttgactcagccagaccagttgtactgactgcagatggtcagacagaaatgtttaccgatgaaaaaggatatgcaagatcgattccgcttccatatggaacttatgtggtaagagaaaccacaagcaaacacaactatgcaccggttgatgattttgtagtgaagatcacagagaatcatccggatacaccgcagacatggcgagtgctgctggataaagaattcaaagcaaaattaaagatcatcaaaaaggatgcagaaacacagaaatctgtactcctggctaatactgagttcaaggtatacgacctggataatcagaaatatgtggaacagacaacatcctatccgaagccaacggtacacaaatcctatttcacaaatgaggaaggatacctggtactgccaaagaatctgaaacctggcaactaccggattgaggaagtgacggcacccgatgggtacacaatatccaaaaactatgtgacagttgcagttgatacagatactgcttatctgaccgatcctgtcacaggagatgcagtcattgatgtggaatataccaatgccccggtcaaaggtcagttaaagatctataaacagggtgaagtgttaaagggatttgataaggacttccagtatgaaatggctggacttgcaggtgctgaatttgaagtctatgcggcagaggatatctatactgccgatcatcaggtagatgcagatggacagagaactttgtactttgcaaaggatgcactggtggcaaccgttacaacggatacagatggttatgcaactgtaaagaatcttccacttggcagatactatgtcaaagagaagaatgcaccggacacttatgtgttaaatacggtgccggaaaatgtcgaatttgcttatgcagatcaggataccgcagtgatcgagaaagaaatctctgtcacagatgaacgacagaaagtgtcgattacggtcgaaaaacaggatgctgagacaggcaatacagtagccggagcagtgttcggtatttacaatgcaaaagacattcagacgaaagatggaaaagtgatcgtcaaagcagatactcttttacaggaaatgacttctgatgaaaaaggtcaggcagcatgtacactggatcttccacttggaagctattatgtaaaagaactgaaagcaccagatggattcgtatcttcggatgaagtactgagatttgatgcttcttatcaggggcaggatgtacagacagtaacattaaaatccgtaaagaagaaccagccgacaactgttgagatcacaaaatcagatgcaacaaccggtgtagaactggatggagcttatctgaaagtaacggataaagatggaaatgtagtagatagctggacatcttccaaagatgcaccgcatgtgatcaaatatctgaaagtgggtgagacttataccctacatgaagagtttgcaccgcatggttatctggtagccaatgatgtgacattcacagtcaaagataccggagaggttcagaaagtggaaatgaaggacgaggtaccggttggtgaactcatcatcaacaaaaagggagaatttctggattctgttacgctggccgataaggtcaaaggtgtggtggaacacattttcaactatgtaaccggaaaactgacagatgttacgtttgaagtctatgctgaggaagacattaaggctgccgatggcgtcagtgacgattactataaaaaggatgaactgatcgcaacgatcaagacagatgaaaccggtattgcaaaactggaaaatcttccacttggtaaatactatgtgaaagaaacaggaactgcttacggtcatgtactggatggtgagattcgtcatgtagatctgacttacgtggatcagaatacaccagttgtagtctatgacaaagactggcagaacaaccgccagagagtagaagtcaatgtacttaagaaagaaaaagattctgaccgtacattggaaggcgctatctttggattatttgccaaagaagacattaagtctgagacaacaggtaaagtcctgatcgaagccgatgagatcattgagctgaaatctacggatgaagaaggaaagatcacatttgttgcagatcttccaataggagcaacttactatgtaaaagagctctatgcactggacggattcgtaaccaacgatgaagtaaaggaatttacctttgagtatgcaggtgaagatcagccgacagtcacttatgattttacctttgataatcagccaaccgtcgttgaatttaccaaatccagtctgacaaccggaaaagaacttccaggatgtaagctgaaagtggtagatgctgatggaaatatcgtggatgaatggacttccggtaaagaagcacatgtgatccgtgagctgactgtcggaaaagaatacacactggttgaaacaaaacctgctgatggttacgtgacagctgaaagcgtaaagttcacgatcaaagatactgccgatgtgcagaaagttgagatgaaggatgatgtaacgaaggtgaaaatctccaaacaggatatcgccggaaaagaacttccgggagcgaaactcacaatccttgatcaggatggaaaagttgtggaaagctggaccagtacagagaaagcacattacatcgaaatgcttccgatcggaaaatacactctccgtgaagaaacggcaccggatggctatctggttgcaaaagatgtggaattcgaagtaaaggatacctgtgaagtacagcatgtaactatggtggatgagaaaaaaccggcagaaaagacaccggaaggtggaaaacctgtcagtgattcaccaaagactggggataacaccaatctgtggctgtggtttatgcttctcggcattggtgcgactggtacaggagcccttgcatttatgagaaaaaagaaacactaattaaataagaatgagcgttcatggaaaccgaaaggaatctgtggacgcttttttagatgggagaaaccatgagaaatatcattatttttgttgctcttctgggagcagcggcaatatttacagttttgtattgtctcattgctgccggaagtcaggcagagaaaaaactgacagaaatcatgagaaaagaggaagaacagaatgaagactaataaagatctgatcatagaaccaaatgcagctattgagggaagaaagtacagcgaagaaaagccatggtcctgcaagtactgttactggtggggaggcaaaaagaaaggctgtagcttgaaacagtgccactatctgcttccggaaaagaaaaaagcagtaaaaacaacaccatgtggtggctgtccgtatggaaaacatgttccatgcatcggatattgtattgcccgtcttcattctgaaatgaaaggaaagaaaggacgtgggtaattgcaggaagaagtaaatcagaaagtgatcagcctgagcatccagggagtcaagatcactgccagtgtgctaaaagcagcccttcggaagttcctggaaatggacaaccggaggaaacaggaaacaacgcaggtgaaaatggctgaaaagaccggacgggctcaggagaaaggaagggaaaaagcccgaaaaaagattgaaaagaaaaagccacatggaaagcagaccatcaagcaactgaatgcacagggagtacagctttccaacataaagatcacagatgaaaatatcaaatcctttgaccgtgtggcaagaaagtacgggattgattacagcctgaaaaaagaagtcggtgctgatccaccaaaatatctggtcttctttaaggctaaagatgtggatgtgatgacagcggctttccgggaatatgccggagtagaactgaaaaagaaacaggcgaagaaatcatccgtcagaaagaaactgcagaaatctgtagaaagaaaagcaaagcaccgccagcgtgtgaagcagagacaaaaatccagaggtcaggaacgatgatccgggaaaaattacagaagatccaggtcaaacgactggtgatcttaaatctcccatatttctttatcttctatgtagcagataaaggatcctggctgtaccggcattgcctgggagaaagcatggtccagagacttggcgtgatgttagtcaatttccgactggcatttttaagctggctgccaagtatcgctttgcaggatcttacagtaggtgttctggttgcaggtgcattaaaactggtggtctactatcgttctaaaaatgcaaagaagttccgacaaggtgtggagtatggatctgcaagatggggaaacagaaaagacatcgaaccctttatggatccggtctttgaaaacaatgtcatcctcacagaaacggaacgtctgaccatgaacagccggccaaaagccccaaagtatgccagaaataagaatgtgatcgtcatcggtggttccggatccggaaagacaagattctatgtaaaacccaatcttatgcagatgacggatcacgtgtcctatgtggtcactgatccgaagggaacgatcatcgttgaatgcgggaagatgctggtaaatggaggataccggatcaaggtattaaatacgatcaactttaaaaagtccatgcattacaatccgttccattatatccggagtgaaaaagacatcttaaagctggtcaataccattattgcaaataccaagggtgagggcgaaaaatcaacggaagatttctgggtcagtgcgacacgttcgcaggcggtaaaaagtctgcgcacagtgttggtttattaaatcataaccagtctgtgaactggtaatccgataggtggaatgatggggtaacgccctgaaacgtctatccttgacggacttgcgtcagctgtaatggttggggtaagaagctccgtgacaacgaccgagagtagtcgtaggaatctgccaaaagattctcgaaaacgccccagaggtggggtgcgctacctataggtctaggatctataaaatatctatgattagaatgtttactttggcgagtaaactgacgaaaactgcgaatgtacggttctaaaagaagaccatatagaaatgtatgggtgcgttaaagcgcagtcagtgtggttcagtagaaattcgccctacgaacgaccatgttgtgttacaggcacatccaagctgacaggactatagcagagatctaaggatatatgtacagataggattatcggaacgtggaaaggcaccagattccattagaggatagcctgacgaagaaaataagcaggtgaactggtgctgaaaagccgtgatcgaacttatgatgagttctgcgaaaaagaggaactcggaggaatggtcacaagtcggttgaaataaacaggcattattcagtctaatgataaggattacgagtaagaccaaaagggtcactttcgagaggaggtgatgccttatgccaaagaaaagtaaaacattatgtgtagatgacctgcgtcatgcggagtactacggaatgcaaggtacttttgatgaactatatcaaaaaagtcagaacggtgaagtatttgagaatcttatggatttgatactgagcagggataacattttacttgcgtaccgaaacatcaaagcgaacaaaggcagctacacggcaggaacagacaaaaagaacatcacagatattgggagtcaaactcctgatgatgtggtaaaaagagtgagatttattgttacgggaagcgaacacggctacagaccaaagcctgtaagacggaaagatatcccgaaaccaaacggaaaaacacgtccgctgggaatcccatgcatatgggataggttgatacagcaatgtatcaagcagatcatggaaccaatctgcgaagcaaagttctgcaataatagttatggatttcgtccgaatagatccgttgaacatgccattaacagaacctacaccatgcttcaaatgatgaatcttcattatgttattgagtttgatattaaaggatttttcgataacgtaaatcatagcaagttaatcagacagatatggtcgctgggtatccatgataaaacgctgatttttattatcaagcgaatactaacagctccaattaaaatgcccgataatacaacggtactgcccaacaagggtacaccacagggaggaattatctcaccactactggcaaacatcgttctaaatgaattggattggtggatagctagtcaatgggaggaaaatccgattgctataagcagagggcgagaaagaataatcggaaaaactaaagtttttgataaaagccatggttataggattatgaaaaacacagaaatgaaagaaatgcatatcattcggtatgcggatgattttaggattttctgtagaacgaaagaggacgcagtcaggacaaaagaagcggttacggcgtggattgaagagaggttgaaattagaggtgtcccctgagaaaacaaggattgtgaacaccagaaaacggtggtcagagtttcttggattcaaaataagggtaaggctgaagcatcataaatatgtggtgcagtcggcaatctgtgacaaaaaggttgaaattgaaagagcaaagctagtggaacaagcgaaaaacatcgcaaaacccagagagaaaaaaagttgtttatcagaaattcagctatataactctatggtgttaggcatacagaattactatcagcttgccacctgtatcagtattgattgcagagaactccataggcgagtaatgacagttttgacaaacaggttaaatacagaaacaggaagtatgctaaaacatgagggtggaactatcacccaagcagaaaaggaaagattcggacagtcaaaaatgattcgatatgtttcaggaattgaccagatgatctatccgattgcattcatcaaaaataaaataccgatggcgaagcgatcaatcgtttgtagttatacaaaagaaggtcgtgctccgattcatacagaacttaaccttaatcagtatgttctgaaaggactgagagaaaaaatatccgttggtcatagcacagaataccatgacagtaaaatatctttattttctgctcaaaagggaaaatgtgcaatcagtggagaagaattcgcagatgcggaacatgtagctgtatggctcaaagtaccaagagcacttggtggatttgaaagatataaaaacatggttctgattcacaaaaaatatctgattctgttacaagaactgccccaagcagtaataaaagacctgataaaaacactcaatatcacaaaaaagatgctcgtgaaaatcaatagtctgcgagagcaggcgaacctgtcagcaataatataaaacttaaatttggtgactgattaaatgtctcgtgaagacaatcgatggagcgccggatgcggtgaaagtcgcatgtccggtgtgaagtgggggaaaaggtggagataatatcaaaaccttacctatcactataggccgaacgtctattgtattctgcactgatcggatacatctggtatgaggcaccagaggaagaacagaacttttctactttgctggaatttatcaatgccagtgagaccagagaggatgatgaagaatttaaaaatgcagtggatgaattgtttgaagaactggaagcagaaaatccggaacactttgcagtaaggcaatatcgcaagtacaagcttgccgccggcaaaactgcaaaatcgattttgatttcctgtggtgccagacttgcaccatttgatattcaggaactaagagaaatcatgtcgtatgacgaaatggaactggatatgatcggtgatcagagaacagccatgtttgtcatcatcagcgacacagatgacacatttaactttgtggtagcgatcatgtacacccagctctttaacttgctttgtgataaagcggatgatgagcatggaggcaggcttccttatcatgtacggctgcttcttgatgagtttagcaatatcggacagattccaaaattcgacaagttgattgctacgatccgaagcagggaaatctccgcttctatcatcttgcagtcacaatctcagctgaaaactatctataaggatgctgctgagacgatcacaggtaactgtgacaccgttcttttcctgggcggaaaggaaagctccacactgaaagaaatatcagaaaccctgggaaaggaaaccattgatctttacaacacatcagacaccagaggcagcaaccggtcctatggactgaactatcaaaagactggaaaagaactgatgagtagagatgagctggcggtcatggatggagaaaaatgtatcttacagcttcgaggagtccggccgtttttaagcaacaaatatgacattacaaagcataaacggtacaaagagcttgccgattttaataagaataatgtgtttgatgtcgaaaaatatctggcacaccgactggtgatgtcggaagatacagaatttgaaatgtatgaagtaactgtaacacaagaagatgtatcagcgattgaagctgaggaaggtgaggattgatatgaaagaaagaattcgagccccctgctactactgataaggatataaaaaggtctgaataaaagggaaaggagtagagccaaacgcttacagaccataagaaaaagcgtttgttcacacatgattatggctttttttagcagtgcaatcaatatccttcagacactggtcgttgcaatcggtgccggtcttggtgtctggggcgtaatcaacctgatggaaggttatggaaatgacaacccgggtgcaaaatcccagggaattaagcagctgatgagcggtggtggtgttatcctgatcggaacacagctgatcccgcttctgagtggattatttggttaagagaaaggagtagagatccatgttcagtcagatttttgatgcgattgaggaatggatgagggaactcttaaccgggatgatcacttccaacctggacacgatgtttactgatgtcaatcaaaagactggtgagatcgctacccaggttggacagaccccgcaagggtggaacggcagcatattcagtatgatccggaacttatcggattccgtgatcatgccgatcgcaggtattattatcacactcgtactctgctacgaattgatttctatgctgaccgagcgcaacaacatgcatgatattgatacctggatgtttttcaagtacttcgtaaaaatgtggatcgctgtatatctggtgagtaacacatttacgatcacaatggcggtattcgatgtgggccagcacgtagttaattctgcggccggtgttatcacaggaagtaccgccattgatatttcttcggcattgacggatctttccgcaacactggaaagtatggaaatcggagaacttgttgtattggcgctggaaacccttatcgccggcttctgtatgagaatcctgtctgtactgatcacagtgatcatgtatggacgtatgatagagatttacctatatacctcagttgcgccgattccattcgcaactatgagtaacagagaatggggacagatcggcacgaattatttcagaggactctttgccctggctttccaggcatttctgatgatggtatgcgttgcaatctatgcagtgcttgttgcaggtatccagtattcagataatctgagttcttcattatttggcgttatggcttacacagtgatcttatgttacagcctctttaagacggcatccttaagtaagtcgatatttaacgcgcactaaattacaggaaggagtgaaaatcatggcatatgtcagcgtaccgaaagatttaacaaaggtaaagaataaagtagcatttaacctgaccaaaagacagctgatctgtatcgggataggtgctgcaatgggaattccaagctatttcctcttgcgtaatgtgatgggaaacagtaatgcagcaacggtcatggtgcttttgatgttaccggcatttttatttgccatgtacgaaaaagacgggatgcatctggaagatgttctgatgcatatgatccgggtgaagtttcttcgtccacccgtcagaaaatatgaaactgaaaactattatgaaacagatccggaacagatcagacagtctccggatgcaggaaaaccgaaaggaggaaaaacggttgcgaaaaaagaaaaataagaaaactgtcacagataccgggtacaaaaaagtagacagaaaagagaaaaagaaaaaagaaaagcaggaagaaaaacgcaggcagaaaaaactgtctgttcagcagtcaatcgcttataaggaaatgggaagagatggaatctgcagggtacagggaaaaacttattctaagtgcatccgcttctatgacatcaactaccagctggctcagaacgaagataaaaatgcgatctttgaaaactggtgtgattttctcaattactttgatgccagtattcattttcagctgagctttatcaatcataaaagtagcatgaaagaatttgaacaggtcatccggattcgtcctcaggatgatgcctttgacgatgttcgtatggaatatgccaagatgctgaaacagcagctggcgaaaggaaataatggactggtgaaatcaaaatatatcaccttctccatcgaagcagataatatccgggaagcaaagccaaagctggaacgtattgagtcagatatcctgaataatttcaagatccttggagttccggcttatccattgaatggggtagaaagactgcagattttatatgagactttcaatccagataacatgacagacttccagtttgattatggttccatgatccggacaggactcaatacaaaggattatgtggcaccgaccagttttgtattccgagacagaaatacgttccagatgggaaatactatcggggctgtctcttatctgcagatcctggcaccggagcttacggataagatgctggcagaatttctggatatcgataagaacctgatcgtcaacctgcatgtccagtctgtggatcagatgaaggcaattaagctggtaaaaagcaaagtgacggatatcaaccgtatgaaaatcgaagaacagaaaaaagcagtccgggccggatacgacatggatatcatcccatcggatttgaatacttatggaggagaagccaaacgtcttttggaagatctgcagtcacgaaatgagcgtatgttccttgtaacagcgctctttttaaatactgcaaagacaaaacaggcactggataatgccatcttccagacggccggtattgcacagaaatataactgtgtgctgaaacgtctggattatcagcaggaagaaggattgatgagcagtgttccgttgggagtaaatcatatcccaatcaagcgggctcttacgactaccagtacagcaatctttgttccgtttacgacacaggaactttttatggcaggagaatccttatattacggattgaatgcactcagcaacaacatgatcatggtggatcgtaaaaagctgaaaaacccgaatggactaatccttggtacacctggatccggtaaatcctttgctgcaaaaagagaaatcaccaacgctttctttgtcacgaaggatgacattatcatcggagatccggagggtgagtattatccactggtccatgcacttggcggacaggtcgtacacatttcaccgaccagtaaggattatatcaatccgatggatatcaatatggattattccgatgatgacaatccacttggagtgaaatccgattttgtcctgtctttatgcgagctgatcatgggaagcagggatggaattgaagcagaggaaaaatcagtgatcgaccgctgtcttccactggtgtatcagaagtactttgcagatccaaaaccggaaaatatgccggttctcggtgacctgtatgactgtcttagaaagcagaaagaaccgcaggcccagagaattgcaacagcgttggaaatctatgtaaatggatcactgaaagtatttaaccatagaaccaatgtggaattgaataaccgtattgtctgctttgatatcaaagaacttggaaagcagctgaaaaagattggaatgctcatcgttcaggatcaggtatggaacagagttacgatcaaccgtggcatcaaatctaccaggtactatatcgatgagtttcatcttctgctcaaagaagaacagacagcagcttattccgtagaaatatggaagagattcagaaaatggggaggcgtaccgactggaatcacacagaatatcaaagatcttcttgccagcagggaaattgaaaatatctttgagaacagtgattttatcctgatgctgaaccaggcggcaggtgacagacagatccttgcaaaacagttgaatatttccccatatcagttgtcttatgtgacgaattccggggaaggagaaggacttcttttctatggaacaacaattattccatttaaggacaagttcgataagaccttgaagctgtacagtttgatgactacaaaaccggaagaagttgaaaaacgagagaaagaaatggaggcggaaaaacatgaaggaaatcgataagatccgaatcaggcagtggaaccaggataatccttacattcagatgaaaaatctggaaaatgcgcagcctggataccgtgttcatacagttaatgacgatcatcatctgtatgagcttccgctggaaacacagaatattatccttgactgggtattctggaatttctatccggcacaaaagatctacccacatcttaccagtgatgatctgaaagaagttttgtataaacgaacccagatccatctgtacaataaccagttcaaggaagccatgctgatcaatggattctggccaagagatccgagtgagctgaactgggtatttcatattcaggcaagctctccggcaatcaggacacaggcagatggttatcctggtatcccgattataggacgccaggaactgaatgagtacagaaagaaaagttgtgccaggaggtgatgacctatagctggaaaagaatttaaaggcaaagataaaaaggtcgcaaagatgaccagagatggtctgacagaagaaaatctccatgatggtagtgtaaaagatatcagtcacaggagccgtgggcgaccggaaactaaagaagaatttgttcctgaacgggaacggaaaaaggctgagaatgaagattcaaaatcgggaaaaggtaaacgactgcagatggaaaaaatccggaaatcttctgtccggcaggaagctgttgagaatacagttgaagttacaccggaagaaaaagtatccggatatcgaaagaaactgcatcgccatgaaaaaatcccggatgatgataacaatctgaacagccaaaagaaatccattcggaagaaacagctgcaaaaacagatgaccaaagaacaggcaaaagccggaagattatcctttgatgatgaaggaaatcagatggtgaaaggtgctggcatgaaaccgggagggacagccgggaaatacattgccacacaagctgttatatctggtatgaaagcagtctcttccgaagaggaagaaacagatgaaaatgcaggtgtggaaagtgccagacttgcagagcgtgaaacagaagctgcgttacgtggtctgcgtcatgctcagattcgaagcaaacgaacggatgtgaaaacccatcgcagaggttatcgtgaggctgccgtagaaaagaaactgaaatttggttctgcagaaagtatggaaggagtcaagaatgcagaaacggtaaagaaagccgaacaaaagagacatttctataaccgcttctttcagaaaaaacgatataaggatgcataccgggcagccagagccggaaaatccgctggcagtctaggtggagcaacaaccattgccggtgtcgagaacatgacggtaaaagcaaagattgccttgaaagagatcataaagcgtaatcgtgccatgttcgcaggcatcggtatttttgcgcttctttttcttgtcatagcggtatctctgggaagctgcagtgcttctatcgagggtgctggatctgtgatcggtattacaacgtatccaagttcagacgaggatatttatgctgctgaaaatcaatatgctgctttggaaagtgccttgaatcagcagatcaatgagatggaacgaagacatccaaattatgacgagtatcagtacaacattgctgagattggtcataatccataccatcttatctcgtatcttactgcaaaatatggggactggacgtactcagatgttgaaaacgagctgcaatctctttttgaagcacaatatcatctgaatacagaaggtcgaacagaaacggtgacagaaactagaaatgttcgcgttggagaatcattgggacaggtagtgacaagcggatattgtaattgtcgaatctgttgtggtgtatggtccggaggtccaactgccagtggggcatatcctactgcaaaccataccattgctgtagatgcatccaatccatttgtgccgattggaactaaggtagtaatgaatggtgtggaatacacggttgaggataccggagcctttgcacgatatggtgtgcagtttgacgtttactatgataaccatgctgccgcttctgctcatggacaccagacctgggaagcctatatcgcagatgacaatggcagtcaggaagtaacggttaccagtaccagcactaagaagattctatatgtgacactgacaaatggaagctttgatgctgtggcaagagccaatctgaatgcagagcagctgatcatttacaatgcattaaatacgacctatggaaacagaaattatctgtgggatgtaaacaatgtgaccagtggatcaggcggtaatggaatgagttatgagattccaccggaagcactgcaggatgaagaatttgcccgaatgatccgagaagcagaaaaatatctgggagtaccttatgtatggggtggctactctccatctggatttgactgctcaggtttcgtatcctatgtcattaatcactgtggtaatggctggaactatggacgattgaccgcggaaggattaagaggtgcatgtacttatgtatcaccgggagaagcaaaaccaggagatttgatcttcttccagggaacgtataacacatctggtgcaagccatgtgggtatctatgtcggtaacaatatgatgatccattgcggggatccgatccattactcaaatatcagcacatcctactggcagcaacatttcatgtgctttggaagactgccataaaggggtgaacgaagggaggtgaaagtttgaataaaaagataaaaaaatatctggatgagattgccaagacagagaaaaagatcgcggatctgcagcaatatcttaggggtgtccaggctgcattaaagcaggaagaggacaatgagatgatcaggtgcatccgtggtatgaagatggataataatcagttatatgatcttttggatggtatccagagtggaaaagttaaatttcaggtaagcagggagtctgacgatgaaggttcaggctcctttgtattcacagaagaaaataaggaggaatatcagaatggtgaaatggaagaaaatgaataagaaaatggcaggactgctgttgggagtcatgatgctttttacagcatcaaccacagcatttgcctatgtggatgaatcggcagaggcatccaaagtagagacaactcagacggaacagtcaacagacaaagaagagaaaaaggacgaggcgacaaacacaaacgaggtgctgccggaagatggaacagacaagggaactgcatttacgacacctggcaatggtgaagtcaaggatgacattaccgatgattccacaaaggaatttcttacggttacaacgaagaataacaacactttctatatcgtgatcgaccgtagtgccacatcacagaatgtctatatgttatcccagattgatgagaatgatctgtccgaatttctggataaagacagcactgctactgtcgtaacaccacagccagataaatcaaaggtagtgctggatgaaacaaataatgaggatgtagacaaggaagctaccattgatccggagaaaacagcatctgcaaaaaccaatatgggtgcaatggcaacaatcctgattttggctctcggcggtgtggcagcttactactacttcaagatctataaacctaaaaaagaggaagatgaggatgatcagccggaaggtttggaaacaggtggactggaagaagttccggatgaggaagagtctgaagacgaagattttgaagaaaatgaaaaataaataaacttttttagcggagggggctgtaaaacatgctctctccgtttcgttatatgaaggaggtaatacatcatgtatttagtaattgcagaaaaaccaagtgtatcaagagcaatcgcagaagtgattggagcacaggaacgagaagacggatatttacaaggaaccgactgtatggtcagctggtgcttcggacatctggccgaatatgtttcaccggatgcttacgatgagaaatttaaccagtggagatatgaagatctcccgatcatcccgaaagactggaaagttacagtctcagaagataagaaagatcagttctatatcttaaaaagactgctcaacagtccggaaattgaatacgtcgtaaatgcctgtgatgccggacgtgaaggagaattaatcttcaaacatgtctatgacttatccggaagtaaaaagccggtgaaacgattatggatcagttctctggaagattccgcaatccttgatggaatgcagcatctgagatccgcagaggaataccgacatctggccgaagctgctgtatgccgttctcaggctgactggttggtcggaatgaatgcaaccagagcttacaccacaaagtacttcaaaaagctgaccgttggaagggttcagacaccgacacttgccatgttggtggaacgtgccggacagatcagcaatttccagaaagaaaagtatttcaatgtagaactggattgtgacggaattccggcagtaaagccaaaaatctttgatccggatgaggcggaacagttaagaagcagatgccatggaaatgaagctattgtcacttcagtaaaagaaacggaaaagaaagtaaaagcaccaaagctttatgacctgaccacactgcagagagaagcaaaccgtatctatggaatgacagccaaacagacactggataccgctcagagcctgtacgaaaagaaactgatcacttatccaagaacagacagccagtatctgacagaagatatggaacagaccgcaagaaatgtggttcgtcagatttatgagaaatatcagctgacaggtccgtttgatcagccggagcagccagatgtgaagaaagtcatgaataacagcaaagtgacagatcaccatgcaatcatcccaacgatggagcttgcatccagccatctggatgaactgaaatcctgggaagaaaagattctgttcctgattgcagtccatacggtcatggcaatgagtaaggatcacatttaccaggaaacagagattgaagtggaatgccagggagaaatcttcaaagcaaaaggaagaactgtgttgcaggatggatggaaactctttgaaaactgcttcaagaataaggatcgcatggcaatcgtagatccggatcaggaaatgaaagagaggatgccgaaagtaacccagggacagactttctatgctgtagctgcagaaaagacagaacattttacatcgccaccaaaaccatacagtgaagatactctccttgcagcaatggaaactgctggaaataaggaattcgatgaagacacagaaaagaaaggattaggaactccggcaacaagagctggtatcatcgaaaaactgatctattcccagtatgccacccgaaaagggaaacagatccttccaacagatgatggaaaagtccttgtggagatcctgccagactttctgaaatctgcaagtatgactgcagaatgggaaaatcagctgctcttgatggagcatggagagattgcaccggaacagtttatgaccgggatcaaaaacatgctgaccatgatgctgaatggatgcgatgcgatttccgaagaagaaacaagaagatttcagaccagagaaagcattggaacatgtccggtatgtggaagcctggtatatgaaagcaaaaccaacttctattgtagcaaccacgattgtcactttgctctctggaaagataaccgctatctgcagagcatggaaaaaaccatggataaaaagatggctgcagaacttctgaaaagtggatgtgtgcatgtaaaagacctgtattccagaaagaagaatatgtactttgaggcagatcttcatatggatgcagatgaaaccggaagggtgaatttttctttatcctttcccaaaaagaaaccaaaaaacaaaagcaaaaagaaataagaaaacagattagaggaggaaacgaagaatgaattttaatgaatttgtaaatgaagtaaaggacaatatcaaactctttttaccaagggattatgagaatgcagaagtatcaacgatggagtgtcataaactgaaccgtgcctatacgggactgatggtgagaaaagaaggtgagatgcttaccccgacgatcaatcttaaccagctgtatgaagcatataaagcacagcctggcgtaacaatggaaactgtatgcagaaagattgcagatatagttattgaggcaccgatacaggttgatctgaaagctattttaaactatgaagatgtgaaggacaagctgtttatccgtgtgtcatcagccgaagcaaataaggaagtcctcgaaattgtgccacaccagctaaaggaagatcttgcaattacctatcatgtggcagtaggcaagaatcaggatggattaagttccatgctgattacaaatgaaatgatgaaggaatatggagtgacacaggagcagattcatgaagacgctatgaaaagttcaccgcgtgtcatggtcccagaggtatcaagtataggtgtactgatagatgaaatatatcagaaaaatattctcatgctgacaccagatgaacgtgaaatgctgctagaaacattgcaggagtcaagcgagatgccgacattctttgttgttacaaatacagaaagaattgatggagccggtgtgatcttttatccggaattcatggataacatgggggaacttctgggaaatgatttcttcattttgccatcatccatccatcaaatgctgatcttgccggatgacgggcaagtggatgcggaaatgttaagagatatggtaaaagaagttaatgccactcaggtagcaccagcagaacgccttaccaatgatgtatatcactttgacacaaaggatcacgtctttgaaaaggcagacaggttcacagaacgtcagaaagaaaaagaagcgcaggttgcaaaaacagagaaagttggaaaagaacagccggatcagaaaccgaaaacaaagaagcacgatatggaactctaatatcaagcatgaaacccgttaaatgagcaaacgccctgcggcataaggaaatgtcgtggggcattttgaaaaggagaagattatgacgaaagagaacattaaaacaaatacaagcttaagatacagccagtatcgaaaaagattatcacacacattttcgtttaaaaaattgaagaagcaaattgagacgttacatgatcaggaatttattataaatgtgccgattggaggtgttgctgatggcagataaattagaacaggtagcaattcgtatggtggaacagccaccactttatagtaatgaacctatgaataatccagatgtagcaattcgtgttatgaatgaatttctttcccagatggatcgggaactcttttgtattgttaatttacaggcagatttaacaccgatcaatatgaatatcgtatctgtaggatcgctgaatgaagcattaattaatccaagagaaatatttaagagtgcaattctttcgaatgctcattcaatgatgctcattcataatcatccgtccggaaatctgacaccatctacatcggatatccagactacagcaagaatgcaggaattaggggaattgatggggatttcattggttgatcacatcattacaggacggaatgggaattactattcctttcgagataaaggagaatttccagatagcagggttcgtttttctactcgtgttgaagatattgatctgactaaaggaatggtgactgaagccaccgcaccctatgaagaagtaacagatacaaaagaaaagggtgacgtaagagatattccaacagtgcagacagcaacaattccattaccggttcagggaaaagatatggacagcattatgcagtcactggaatccggtgtggaagaactttttacaagtaaccgctatcaggaatttcttaaaaccatggcaaagtttcacaattattcctttaataatacaatgctgatcgccatgcagcgaccggatgccacacttgttaccagctacaaaaactggcagtccatgggtagacaggtcatgaaaggcgaaaaaggaattacaatcattgcaccggcaccatataagaaaatgaaggaaaaagaggttctggatgaaaatcagcgaccgatcatgggaaccgatggaaaacctaagactgaacaggtggaagttacagttccgcattttaaagcagttaccgtctttgatattgctcagacatccggggaaccaatccagacactggcaccggaattactgactgcagctgtacaggattttgattctttcatgcaggctattcagaaaatatccccagtgccgatacgattcgatgagatcgatggcaatgccaatggatattatcacaatgcagataaggaaatcgtgatcaaaaaaggactcagtgaaagccagaccttaaagactgctattcatgaaaccgtccatgctaaactgcatgacaaggaaatcatggaaagcctgggtgtagaaaaagaccgtctgacaaaagaggttgaagcagaatctgttgcttactgtgtgtgttcttcctttggtttggatacatcggattacagttttccttatattgcagggtggagcagcagccgggaaatgaaggaaatgaaagcatctatggatgtgatccgcaagacagccggtgaaatgatcgatcagcttacagaagaactggaaatcattcttgaagaaaaacagaaaacagaattacatgaaaaatacggcattctggtagatgcactggaagcagccggataccgctatgattatcgggaaagcgaaccgggacatattgtactggcaccggatgggacacatgaaattgccgggtatttgcagtttgaatcatggggagatatccaaaactggctggaagacacgattacagaagggacggatatttcggagagagttgatcgggctatgtacccatttaagtatgattataccctagaggaagaaatgttcagaggtaatggtgaccgctatgcgatttatcatgtggatgaagacacaccgggaaaacaacatttatttatgaatatggcaatggtcaaagaagatggcattacaatcgatgcagcaaattataagtgtgtctattccggcagattacatgaaaatgaaaagctggatgatttgtacgctatgttcaacgataatccaccggcagattataaagcacattctatgtcggtcagtgatgttatcattacaaaccgtggtggggatatgcaggcatattacgtggatcgatttggatttgcagaacttccagactttgcagcacaaagagaaaaaatactcgatattgtcccggaaatagaaaatgcggattatgaaaatgatcttacatgtatcagcttttatgcggctgaatgtgctgaatttcctgtaatgggtgaagtacattatgacctgacattaccagaagccttggaagcttatgagaaaatcccatcagaacgtatgcatggactgaaatgtgttggctttgatctgaaagacggaagtgattatgaaggaatgcagagtctgatgattgaaggaaaaatacagaaagaatttttgaattcgattcctggatttagagaaaattcttatgtgcaaaatgcaatcagtcgtgtggaaaaatacttggaagaaagacatccaaatgtggaaaatcctctggaatccaataagaaagtggataacgaaaaaaatataagcgaagaaaaaaacgagaaggagctgaatatacagatgaaaccaataccgaaaaagaaaaggggggaaatgagcctatgagaaatgtaaacctggaagaaaacgaactgactattactgctatcttccagcagcacacaaaggaagaaacaatccaaacactgaaagaagctttggaagttttggaacaggaagaaagtgatcctgagaatgatgaaataattgagatcatcaattctacagttggaaaattacagcagatcgaagacaaatactactattctctggatctgaattattatctgaataacttggaggatgatgcctatgaagcttaatcaatttgcagtctaccgagtagatcagcagacagcaggaaaagcactgtggcatctgccatatcaagaggcaagacagcagaatgtgtcgattactgtcgaaaattaccgattaatctcgattcatgaaatgcaggaaaatgaaaaagtcgctgacatctggaaacggacgaaaaatcaatgcgaagtcagtgacgtgctcgtattgaacaagaatggagaaatcagctgctactatgtagatgagaactatccacagtatctggccggatttattcgtatcaacacatccggtgcactgatcactatggaaactgagaattatcagattgatgggaaaaaggggaactggattgcaacagacaccgtcattattgatggaaaacagttttatttgatggaacatcaggtataccgagatcaggcccagggtgttatcctggatgcttatggaaaaatggttgtcgaagaatgtaagaaattcgatgaaaagacaaaacaaaagattcatgattacatccaacagcaggtaccgctaaatccggtcgaacagctaaaacaagatggtaaaatccgtctggaacattaccagaaattctaccagaacggcacttatgaacgaagcagagaatctggtacagaagctaactatgatatggtggacggtctggtgaataatcagaagaagaacctggaaaaaatttctgatgcacgcaacaacaaacagacgtcccgaaatcaacaaaataataaacctaagaaacgaaggtccgtaatcaaacgactgcatcagaaacagattgccattgctcgccggtccggaaagccgataccaaagtacctggatcaggaaatggaaagaaagcggggatagaatatgcgaaggttaaagtgtgaaaaagaaacgattattctgactaatgaagatgatggattctatgatgtgtataccttcaatcagagcttgcagaaacggttgaggtcttttgcggagaagtatccggatgattgctggttgaaaggatcttcggaggatggtagtgaaacgtatatgattaaaaaagggcggttatcattgaatttaagaccaccctattccaaggatagaattcataaagcaaccgaacgaattattgaagaacagaaagagcaatcgaaggattcatagaatgcgatttaagagaaaaaagcctcatgaccatgagaaaaaatgaaagcaaaatacgttagctgataaagtgtataggctcaaaagggaaagtgcccttttgggcctttttaatttaaaatagttctaaagaacaagttaacaatctgtagattctgtatgttttaaagatcaatcgttatactaattttagaccgaattatcgttctaaaggaggtgtcacaatggatttaaaggcggttggtcagagaataaaagctgcaagggaagctaagaatcttacacaagaagaattggcaggactggtaaacttgagtccaactcatgtaagtgttatagagagaggactgaaagtaacaaaacttgatacttttattgcgattgcaaatgcattagatgtttcagcagatacactattgattgatgttgtgacacattcggttagcggcgttacgaatgaattatctgaaatgatagagaaactacctaaagaaaagcaacagagaattatcaatgcagtgagagcattggtggaataaatacgtgaataagaagatggaagggcttattgctcttcttttttatttggtttaacgtgaaaatatgatatagtagttctaaagacttatatataattctgaggaacttgataaaatgaagaaaaaaaatataacacttgtatttgttgctatcgttttttcgattattgttggaatgataattggaaaaagcttattaaagtataaagaaggtgagccagatgtagttggcagtttttctatgaatagagatgaaaatcttacagtagttgctaacagaaaaaatatttctgataaaaaggcatttgcaagactgcttttaaaaatgtataaagagaattcatttcattcaataaaattttctacagatcatggatatgcaaccagccttgatatgaccgtatattcttggaaagaagatatcgaaaatggcgaatccattatgcaaatagaatttagaccaattgaatatggaaaagattatgatcttgttcataatccggataaatatgtgctttttatcgatggaacagaaataaaatgaaatatatagatatgcagataaagcgcagaaaaagaggattgctcaacacaggaggatattttcaattaccctcaaaatgataaaagcgaggcagcggaaaatccgttgcctcatttcagtattatgacaattaatctagttccgcccctaactcatacctccaatattctgccgcttcatactctctaggttctgagagtactggtacggtaaagagttcaaccggaacaccgagtgttgatgcgaagagtttcataagatcctcttttggtgttcggacatcgccttcatattgagcaatccggacatcagcacagctgtcgggaaatccaacagctatgccaagttctttctgggtgagatgatttttctgtcttaagtgttttaattttcttccaaatgtaatcatagtattattctcctgtacttccaaaagccccggttcctcgttcattaccaaggtccaggacaaaatctgcgatcacgaccggtgtaatcaccagctgaccgacgcgtgtgtctttatgaatggtctgagaagatgtgcttacgttgctgataatggcatggatctcaccacggtaaccggagtcgatcggtggaagctcgcataccagtccttttgctgccatgctgcttcgtggaaagacatatccggcaaatccatcggggatgatgagaccaaatccaagtggaattcttgcaacctcacctggttttaatacgcaatcataaggcatgaatacatcagcaccggcatcattttcatgtggccggaagggatgatgatctgctttcagaccaaagtcaatcagtttaatctttatggctgctcacctcccttctgatgagcaatggataatctgcttttaagatatctgacggtatccaaagttttgaaataggattctggcaggacatctgtttttccatacagcttcctctctgacagaatggaccggtcagatccggtgcaaaaagaatcgggcttaatttgtacaatctctgccagatctgtagcatcacaatccttgtttcatccgtatttcttctgcaggttctctgactgatcatatgcttccactggtaaggcgttgcactgatgatcagtacgtttcgaagtccctgcggtgtggcatatccggctgaatcatgatcaatgcctaaggtacagagttctgtatagtgctccagatctgactgacagctttttttgtaaatatcctggatttctttatctgctttcatgattccatatggaatagcaaatgcagcatgaccggaataattgctgtactgcagagatgcactcatgtactttacttcgttctgatgtcttgtgatctgtgccaggaagcgtctgcttgcaccaacaacagctacggtaatgaccatgaatttctgcacggttggatgcggaagccctgcaatgttttctacagtcttctgactgtaggattgacggtaaagatccatcagatctgccatgttctggatcgtatgaccgtgttgtgtgagtctggcagcaaagaccatattctgttctgcttcccggattccatagcagtttaagatagctgtttcaatgtgatccataggcctgttcctcctttaccagagcttttaaaaggatcagataattgatgcagtctgtgattttttcatcccactgttccatgtcaaaatgtaacagagtggaataacacatatcgtaaagggatacgacatgtttcgacatcataccggccagtgctgcttttggatcgcagttttgtaaggcggcagcaatcttgaatgcactgaggcggtcaatattgtcaccggtatattctttctttttatgtgccagaatatcggcacactttctcatctgaagttcaaatacaatattaaattcttcttgtgtcatgtgatagttcctcctttgttttgtgatggttatcgttcgagatccttggtttttgatcttactggttccggaatctgcatctgaagaatggcatcaacattctgatcggcagtatccagatcttttagtttttctttcaagctgcttattgcttcttcttcggaagctatctgctgttgcagtttttctttttgtaaagtcaaggtttttaggcttgtcatctttccatcctgataaaaggatctcagccaatctctggcttcttcatatttctgaatttccttcgcatgttctttccggtactttcctttgtactttgcatttgaaaattgggaataaacctccttagttgcatagtactgtccggtataacggatctgatcgttgaggatccttagatcagaccgatgctgagcaaactgtgtctgcatttcttttagttcctgctttgatgcaagcagtgtatttttcagacctgactgcgtatcaaatccatgttcctgtacatagataatggtatttgccatttgctgcaggttagaaagttttacccgatgagcataagccgggctctgcattgctttcacatttgtctggagatttacaaccaggcgcaggtgagatctgacgtagagaatggtcaatggatccttgcgtaagaaggtctgttccaggtgttcttttccatatcgtgttcccagtgcacgttcagtaatccgcttctgtcgatcaggatgaagatagctgtatctgccccgatgatcaatcacagagatctgaaattgttccagaagtttagattggaattcatcaaaactattggaagtggcagcgcattcatcaatcgcatttcgcaaatattctttctgtgtaaggaacacggtggatgttggtttgagaccatcttcgatgattttctgattgatctcattaagtttttgttggtcgtgtttctgtgccatatactctttctgagtgatttttctctcagccggagcaagaagatctatctggtgaagtccttcctgttggcaccgatccatgacagttttcttaaaagtgctcatgaatttatcagtggaacgatgcttgtaaccggcggcttcctcatgtggtttatccatatatgtctgcctctccactgcagtctttcgcacactgttgataacgatgtgagtatggatatttccggattcattgtggccatcggtgtgagtaactaccagtgcctgatatccgggaaacatctgctttgcaagttccaaactgattgcctgtgctctctttccggtaagaccgttttctgtaacatcggctggatcgtagctgataatgtagtgatgacttttgatatcttcatgtttcttatttttgtgaaaatgagcatttgtcagttcacattccttgtcaaaagacatcggatcacagttcagtccatccatataaaactcttttcgtaggatgcttcgtccggattcatctacaatctttttcccgtttttttcatcatgttcaaacagaaggtaattgatagcagccgagtaatttgcatttctgcttttaatgtgttttacgattgccattcataccacctgccagtttcagtaccgcttttctcaataggaataagtccgtgatgcactgatggatttcattttctatagcacgagactgactgccaccactgttaaaatgcttggcgatctgattgagattcgatccgatttttccatattcactgaccagttttctgagatcattcatgtctgcaacaacttcaatctgatgatggatttgcttttccaatagaagtttcctcagatattctgatcggctaacagataaacaagcagcgccttggtctaataaatccagttcgacatctgtaagacgtaatcctataaaatgtctgtgattcagttctttatctttgttttttgttctcatactcctcctttcgctgagactattcctcccgccgggaattcacgtatttcaatatcggctgtcccttccgatattagaaatagtgctgtgaacacctttaggtggaaccaacagacaagtgaaacgtctgttattgagagggtatggggagatccccatcaagataaatcccataggagaacaggatgccaaatggcaatactgttaaacatgggtggatcttgctcttatttgtatccctctatataacgaaacgctcagaggctgttttacagtgagggaaaagaaaaaatatcaaaaaattgataattaatggtgaacttgtgatagaatggaaaaaagagaaaagcataaaggatgtagttgtggagaatatttgttatgattagaaagttgctgaacggagatatcgatagagtcgctgacatatggttaaagacaaatctgaaagcacattattttatttccaatcaatactggaaaagtaattatgaattagtaaaagaaatgctgtcacaatccgaagtctatgtgtttgaagcagataaaatgatacaaggatttgtaggactaaatgatgaatatatcgaaggtatttttgtctccgatgaaatgcagtcatgtggcataggtaagcttttattagattatattaaggataaaaaagttagcttacgattaaatgtataccagaagaatgccagagcaatttctttttaccaaagagaagggttcattgttcaatgtgaaggtttggatgaagctactggtgaaaaagaatacaccatgctatggaaacaaaaatagaaattggaatttgtagaatagaggaattatgatgtttgataagcacaaaagggaatccttgctattgcgggacttattaaagaaattgataattattgtgataggttccattgttgcagcctatggcattacacttgcactgtatgcaggatttggtggcgccacgctcgcagtgctatggcagggtatcgctgaaacgtttcacttgagcatcggtatggcatcttttgttgtagcagtggggatgattttgtttgcattaatttacgataaaagtcaaatccatattgggacggtgctatatcaaattgtatacagcacctgtgtggatgtatttgccacctgccatgtctacagtacatatcgatggttcaacttctttatcatgttgctgggtgttattttgtttgctgtcgggaccggactatatgcgtctgcctcacttggtcgtggctcttatgaagcagttacttttgccttggcagaaaagaacaactggcaagttaaaattgttcgaatagcattagatattctggttgtgataataggtgttttgcttggcgggaagtttggcatatgcacaatcattacagttatcatttcaggcccgattatccaatttgttaatgcgaaagcaaaacgaattttaaagatataatagtaaagaaacctacaacttcaagtttgttgaactgaatccgaaaagcattagggcgcagaggagatagaatcctttgcgtaaaagactaacgaacatatttaatgaaacatcggaaccatcttctttttgttgtctacttataataacgattggagtagtcgattatagacactgcaatcaaaaaaatctgaaaatatatttatcaacattacataaaagtgtgtagatgcacataaaataggaatacatattgaaattcaggtcgttctgtgatagaatctcattactaaaaagtgtgcagatgcacggaaatggggagtgcaatgatggagattaaaagagacgcttacctacagcagctgatcgagcgaaaagataatggaatgataaaggtgattaccggcgttcgtagatgtggcaaatcctttttgctgtttaccatctttaagagatacttactggagaacggcgttgatgttgatcatattattgaaattgcattggatggtattgagaacgaggaattaagagatcccaaggtatgcttcaagtacatcaaggatgccatgaaagacgacgggaagtattatctccttttggatgaagtgcagttcatgctacgatttgaggaagtgctgaacagcctgctacgcatgagcaatattgatgtgtatgtcaccggaagtaattccaagttcctgtccagcgatattgtgaccgaattccgtggcagaggtgatgagattagaatctaccccctctcctttgcagagttttattctgtctatgacggcgattatgatgatgcctgggatgactacatgatctacggaggattgccgcagatcgtaagtttccagagcgaacgacagaaagcggactatctgaagaacatctttgcaaatgtctatctgaaggatgttattgaaagaaataaaattcagaatgtggatgagattgggattctggttgatgtgcttgcatctgcaatcggcgcaccgaccaacccttcaaagattgccaatacctttgccagtgagcgccagatgacttatgctaataaaaccatctccaagcatatcgatcatttgacagatgcctttttgatttccaaggcaagccgatacgatattaagggcagaaagtatatcggtgcaaatctgaaatactattttactgatctgggactgagaaatgcacgtctgaatttcagacagcaggagcctactcatatcatggagaacattgtttataacgagctgctgatccgtggctacaatgttgatgtgggtgtcgtggatatcttcgataaggataaagagggcaaacgtgttcgcaagcagttggaggttgactttgtggcgaatcaaggaaaccagagatactatatccaggttgcatatgacatgacttcggaagaaaaacagacgcaggagttcaattctctgcgtaatatcccggactctttcaagaagatcgtcattgtaaatggcagcaaaaagccttggagaaatgatgaaggttttgtcatcatgggaatgaagtatttcttgctgaatgcgaatagtctggaattttaagtcgatttgagttgttgctgtggtgttgttctatttcaaaaaagagtgaaatgatataaataaggccacggctgatttcatgttggaacagccgaggctcagtttatttttttatccgtacaaacgagactgttccgcagattatggttgattggtgtgtgcggtaatatactatattcagaaaaactattcaggagagtgttagtgtgagaaaatcagattgggcaaaatggttgatcgtgattccggcaatgctaggcattgtgttggtaacctatgtggatcgtataacagatatctggggatttggtgcatttatctgccagctgattgcgattttagaattggcttatggtatgcgaatcgcgatgctggcacagagtagaaagaagtcctaccggttaacaccggaagaacgacatgagtatgcacagtatttatatgagaaacaatatcaacgttaccctgctgtggcgaatcagatgcttttggttatggcaaggatgagtatacttcttgacaattatgaacgggctacacaggagctggaagatatttgtatagataaatttaatccggcacagttgaaggtgtattattacctgaaagtggttacagcagtagtggcaggagatacagaagggcttcaagagagccagatgcgttatgcagggattccggatactaaatgtgtatatccgccagaaactgagcttgctgagtggatagagcagagagatacagtgcagatggcagaagcactgaaaaaggcagtgtcggataagaaagagcatccggtacggatcagtatcattactttgattcttgcatatagtaccttcttttacggattgtggtatggtataaaccgtgatatgggatatgaagtgagatatcgtttcgcagaaatatcgattgctgttattacaatcagtctggcgattcttttaatctggggaatcgtaagcttgtacagacacaattgccaggcattatccatacagcctggtaaaaacagagtggcattaatgatcatttttggagctgctgcgatatttacacttttgattattggaatgagtggtctgagtgtagtgttcggaatggatggagaggagacggtgactggtcatgacagcaaatatacgtatataaccgtgcaggaggattatggaggcgagcggagatatcgaaccaataatccatttgttatgcagagtatggatggtctgtggtggtcttcggattcttcggatataatggatgctgaagaagataacgaagaatcatcggatgcggatacagaggatttcccagtgacagaagatactcagaacggagatgtggtagaagattatgaggcagaaggacagcatgatggtctgacgattcagaatgcgatgctggcggtctataattatcttcaggagaataatgcacttcaaaatatggccttcagttacactgcgaatgcaaaaggagaagtctatggtattgtcagtgaaacgcaggaaacaaaagatggtaatacggtaaatgtaagatattgtctgtatgacaacggagcgaagacggatgcggatggtaattcttgcgaagaactggtgttagaaaaagtatatccagacggtaattacgagaccgaattggtagatttttatctggtaaatacggatacgatgcaggtgacagatgaacagaagaatacgtggtaaaataaattctggggaagtaggtgcattatatgacaatgggagaaaaaataaaacaactgcgaagtgcaaatgggtttacacaagaaatgcttgcagaaaaaatgaatgtgtccgttcggcaactgtaagagtaattaactgatgttaggagcctcagtctttcggaggttggggcttcgatttgtatctatgatgattgccgggtaactttattgaataaatacacattgacaagcatctatgcgtagggtaatttgatatatagatgatttcctatgtgaggtagcgaaaatggaagcaaaggatatgatactaatatgtaaagcattatcggatacaaatagactggagattgttcggatgctgtcagacggagaaaaatgcggatgtaagattctggataaattcaatatcacgcagcctactttatcacatcacatgaaaatattggttgactgtgggattgtaaatgaccgtaaggaaggcaagtggcattattattctctgaacaaaaaagtaataagagaggcaagttcatttgttgaagcttggggaaggtaggaaatgaaagaagaatgtattatatgtaaagcaccacttatatatcttgaaaaagatgaaatgatggagtgtgtgttatgccataaaaaggaattaagcaaaactagatgtgagcagggtcattatgtatgtaatgaatgtcatacaaaaggaatgggtgtaattatagacatatgtcttagtgaaacatctaagaatccgatagaaattataagaagaatgatggcgcagccattctgtcatatgcatggaccagagcatcatgttatggttggttcagcgcttcttaccgcatataaaaatgcaggtggtgagattgatttgccggaagctctgcttgaaatgatgaatagaggaaaagctgttccaggcggtgtatgtggattctggggtgcttgtggcgccggaattagtacaggaatgtttatatcaataatctcaggagcgactccacttaaaaatgaaccttggggtctggctaataaaatgacttctaaggcacttgacgcaatcgggagcattggtggaccaagatgttgtaaaagagattcctatatagccataatctcagcaattgactatgtggcagagaatttcaatatacaaatggaaaagcctgttataaagtgtattcattctgataagaacaaccaatgtattaaggagaggtgtccgtttcatgaataagaaaaaagtcgcatttatctgtgttcataattcatgccgtagtcagattgcagaggtatgcaggtagataaaataattatctacctcctacccgattttagaaattaagaaagttctgccacattcttgtagtccagatggaattaatcatcaatgccgtatttattttccagcgcttcttctgctaattccagttcatcttccagtttttcaatcgcgcgttctctcgctttgtatgtctcgaagctaatctctttcatctggtaagcatactcaaattcatcatcaagtttatccagttcgtcatcaactgcgtctacctgttttttcaaagcgtagaattgttcgtgattctcagttgcatttgtagatctttttgcattgtttacactttttgttatattacggatatcgttttcataagaagagaaatcataatccttttcgttcacattctctactgcgttttctgtgttactgatgttatcatcatcgtcatctgtatttgatgttacaacttcctgtgtcttaatttctacatcttctgctgctccattattggatgaagtgcatcctgtaaaagcaaatattaatgtgagagataataaaactactaatatttttttcataacgtgttctccttccgtctcttggatgttttgtttttgctgttatatgtatcatatagggggaagattaaaaaaagattaaaacaaatagtaatttcaaaaaatgaaaaaaaggactctagcacacgaaaatgattggtattataataattacattatgagattactgattgtagaagacgaaaatgatttaagaaacattgtcaaaaaaaggcttgtcaaggaacattacagtgtagatgcctgtggggatggtctggaagcgatggattatatcgatatgacttcctacgatggtattattcttgatatcatgttgccgggaaaggatggatatgaaattttaagagaattaaggcgacgagaagatgatacaccggttctgttactgacagcaaaagacagcattgaagaccgcgtcaaaggactggatcttggtgccgatgattacctgatcaaaccatttgcatttgaagaactgcttgcaagaatccgtgtcatgatgcgtagaaagccacaatttacatccaatcaactaaaaatagcagatcttattctggatcgtgacacaagaaaggttacaagagccggaaatgaaattgatctttctgcaaaagaatttatggttctggaatgtcttatgcgcaacaaaaatatcgtaatgacaagacagcagattgaacagaatgcgtgggactttgattttgaaggtggttccaatgtgatcgacgtatacattcgttatttgcgaaaaaaaatcgatgcacaatatgaacaaaaactcatccacactgttcgcggtgtcggatatgtaatgagggaaaacgaatgaaacagctgacgatcaagaaaaaaattacgttatggtacaccggaatcattgccgtagttcttgggactattttagttctcgtccttctttttgtggataaggttggaatttctgcgacagaagaagaaatcagtgccgcagtgactggtttctcttcaaatattaattttcaggatgattccttttatcttgacggcgataccgaattttacgatgacggtattatgttttgtatttatgacaaaaacggacgcttactttatggaacgattccaacccaatttccagaagaaactatcctcaagtcgaatacaccgcgaatgatatccggatcaaatcgaaaatggatgatatatgacagcgtctatacttacggtgatgatgaggaaatgtgggtacgaggaattacctccgtacattctatagaacttttcatgcagacatccgagaaaatgctgttgattgtattcccattactcattattctgattggagccatcggatattttatgatcaagcgggcattgagacaggtggatcttatctgcgatgaagttgaaaacatcagcaatggaaaagacctttccaaacgattgtctctgccaaaagcaaaagatgaattatacgaattgtcggagaaatttaacgaaatgttcgagcgcttggaattttcgtttgagaaggaacgtcaattcacatcagacgtatcccatgaactgcggactcccgttgctgttatcatttcccagtgtgagtacttattggaaaatgaaaacttatctgcggaagataaggaagagattgcagtcatcttaaggcaggcaaaacgaatgtcaaagctgacaaacgaaatgttaatgatcgccagaaacgaacagggcgagcagcatttgatggaaaaactggattttggattattaagcgaacttgtaatagaagaactgcagacaaaagcacaggaaaaaaatatcgagatcaccctgcaaaagcaggacgatttatttatgaacggcgaccagacattgattttgcgtatgatgatgaatttaataaccaatgccatcaattacggaaaaacaaatggacatatccatgttatcctgaaggtcgaaaatgaccagattgtcggtgaagtgaaagatgatggtattggaataagtgaggaacacctggacagaatctgggagcgtttctatcgcatagacaaaagccgttccagagaaaatggaggtaccggactcggtctttctatggtgcgctggattgtaaatctccacaatggaaccattcacgtcgaaagtatcgaaggtatcggaacgagttttattttccgatttccgaaaatataaggggctatcgctgtatatccaatttctttttaccaaagagaagggttcattattcaatgtgaaggtttggatgaagctactggtgaaaaagagtacactatgctatggaaacgaaaatagaaatccgaatttaaagaggaggaataatgcaatgaacttctttgaaaatactcgtaagccacaaggcttcggcggaaaattgatgacgaagatgatgaacatcggtcacgccaagttatcacaatggggattctcaaatatctcagtgaatccggacgctgcggtactggatgttggttgcggaggcggtgcaaatattgtagcctggttgggcaaatgcggaaatggacatgtgacaggaatggattattcggaggtcagcgtggcagaatctcaaaaactgaacgccaccgccattaaacaagggaaatgttgcgtggttcaaggtgatgtatctgctatcccttttcctgatgcggtttttgattatgtttctgctttcgagacagtttacttctggcctggattggaaaaatgtttttttgaggtaaatcgggttctgaaaaacggagggacattcctgatttgtaacgaatctgacggaacgaatgccgcagatgaaaaatggacaaagttgattgatggtatgaagatttacacctctgatcaactcattgctgctttgaaagaagcaggttttacagagataaaaatgtattcaaatacaaaaaatcattggataagtattgttgcaacgaaatagctaatttccagttttacgaaataaagaaattgtaggaggaatatatatggttggaagaatttatcacgttggattaaccgtttctgatttgaatcgctcgattgctttctacagagatgttcttgggcttaaatttcagggtgaaatctttatggaaggcgaagagacagataaaatgttccgtaaggaaaattgtaaagcaagggttgcatatttgaatggttcgaaggttcttgaagcaccaccgattgaattgattcagtttgtagacagcaaaatccataaagaacaatcagacttgtttacgacatctatctcagaagtatgcttttacacggatgacattgattttgtttacaaaacccttatcgaaaatcatgtggagtgcttgtctgaaccgcagtatttcgattttagggcagatggatttggggaaagcagagctttttatttcagagacccggatggaatcattcttgagatgatgcaaccactttgatgaaaaattataagtacaggaaaatgacaacttcctgtttgttgaattaaaaatgaaataaagttccagtaatcatagagtgtatggattcaattccatatgctctttttctttacttaatttcaggaaaaatgcagaaatctaatgttacgagtggtataaaaaaaactcgcaagaaaactcgtaagaaaaaaagtaaaaaaatttgcttttgaccactgtaaaacatgctctgagcgtttcgttatatgaaggaataatttttctttcgtatttcaaagaaaagaggataaagagatgacagagaaaagatgttatacagttcaggagttacaggaaatcttaggagtcagcagacctactatttataaccttttaaagaaaaaggaatttcggtggattcagttggatggtggcaagtatcgcatctccaagaagagtttcgatgattggctcgataacttggaacagtaaaaaacagggtgttgatcaggcagattttgtctgcatcgacatcctaaatttttttctggatttgagatatgatataagaaaaaaacactaacactaaaaagacaggaagtgaaaaataaatggcaacagcaattatgaaacaaaaaggaattccggaaatggacgatgtggaagaaatcatttcgaagatttcagaagaaagtccttacaaacggcgtccaacacaaaagagaacctggatgaccgtgccggaaatgggaaagctgctgggattaaaaaagacagatcgatactggctggtacataaaaatgtttttgaatctaaagagattgccggaaagatacgaatcaatattgccagctttgaaaaatggtacgccaatcagattaaatatcataaagttaccggagaagaaccgggaaaagaattgaaatcctggtcctattccgttaaggaagttgcggatctgttgagtgttgatgattatcttgtttatgaattactcaagaaaaatcaaatggaaacggttattatcgattactggaaacgaataccaaaagaatcttttcaaaactggtataaaagccagtcccggtatcgaacaaaggaagacagagaaaaagatgctcttctggaagatgcaacaattacgatgcctgagatggcacagttgcttggaacaaccagaagtgcagtatatacaattcttgataatccgaagtatagtcatttttttgaattcattgtgattgcagaaaagaaaaggatcacaaaagagagttttcaaaaattcctggaaggtcagaaccgttataagctggatccatcgaatgattatgaagaacttgcacaggaacaaaatattgccctggctaatttccggcggaagaaattatcacaaaccggaatacgaggaagcaatggaaatataaagtatcttacttttgatgaagcctcttatctggcaaaggtcagcagaagcatgatcaacaagtgggcggataaaggaaagttcacagtaataaaagttggcagtcgggttaggatccttcgggatgaatttgaggactggatggaacaaagagatttggaaaggagcatgcaataatatggcatcaataagagaacgaaacggaaaattcaatgtaatctattcttatacaaatgaaaaaggtgagagaaaacagaaatgggaaacctatgaaacgaaagccgaagcaaagagaagaaaaaaggaaattgaatataaaaaagagatgggatcatttgtcgtccgtaaatgcaaaacactggatgagcttattacagaatatgttgcactttatggaaaagaaaactgggcgctttctacatatgaaggaaatgtctctcttatcaacaactatattcttccaatcattggtgatgcaaagctgtcagagatcaatacccgattcatcgaaagatattatcagagtcttttgaagagacgcgctgttatcaatccattaaataaaaccagtcgaaatgaatttgtatcgtccagtacggttagggatgttaataagctgcttagaaactgttttgagcaggcagtgaaatgggaattgatggagaagaatccctgtactcatgcgactgtaccaaaacataaatcacaaaaaagagacatctggacagcggatacattaatgtatgcgctcagtgtctgtgaagatgagcgattaaagcttgcaataaatctatccttttcatgttccttacgacttggtgagctgcttggtcttacctgggattgtgtagatatttctcctgaggcaattgaagaaaaccgtgcatatgtcttcatcaacaaagaatcacagcgtataagaaaagaatcgttgaatgcattggatggaaaagatgtgttgttggtatttccgacaaatcataagaagaattctacggtccgtattctgaaaacaccaaagacagaaagcagtgtgcgtaagatattcttaccaaagagtgtcgctaatatgttggtagactggaaagctgaacaggatgaaatgaaagaaatccttggtgatgaatatatggactataacctggttatggcaagtacctttgggcttcctcttggtgatggagcaatccgtggtcctttaaagaaactgattgaggactataatctcccaccggttgtatttcacagttttcgtcatagcagcgttacttataagctgaaattgaatggtggagacatcaaggcggtacagggtgattccggccatgctcaggtcaatatggttacggatgtgtactctcatattctggatgatgaccgaaggaaaaatgcagagctttttgaagaagcgttttatgagaaaaagaatctggatccacagatgcatgtacagcaggaaaataataatgcaactgttgctgatgaagtcgatccggaacttctggcaaaagtgttggcaaatccagagatgcgggcattgctcaattcactggcgaagacgatgaagtaattagtctatctccatcatatctattggaatctccatcatttgatgatggaatgatggagattcagttacaaaaaaggttacagatatttttactgaagaaaatttgccagtcaaaaacgcatggacaaaccgtctcgtatgcgttatattatttatagacaagaaaatatcttgtgctttcgataggaagtttaattgaatactgtttaccatgatcgaacgtacgaagcatggtggtcatataacagatgtcgatggtaatatcaaggcattccccaattattagctggagcaaacaatcagctaactttcagagctttacagagcttgacagagggggtattcagaataactcgaattgaatcggaaacagttttatatagtatcccacttgggtttaccttacctcagattgacagagagtgacaataggttggagctctcctaagcgtggggtcggaggttcaaatcctcttatggacgccagtgaacaacgccgaaagcctttgttttcaagggttttcggcttttcttatataaaaagctacgaaaaagctctttcactgtatgagataaaattctactccaaaatttgatttttgacaacccctccagaatcgaacggttgttataagacaaaatcgccagctaatttttagcagaaaacgggctgttcttgctaatgaaaatgcccttcctgctaatcagccccaaaatcgtgccaaaaatccagctaatcaaaaaaggcggatgttttgaataccatgcagttatagcagataaaattaaatatcgttatgtacatagagcgtctatttgccccgcattggggatggataggcgctctttttttatgcccaaacccatgggcaaatacaagagattggaggtgttttatttgagcaagcctgtttataccgcagacaagccgagcgactgtcattactgctacttctggacgaatggcagaaagggctgccgtctgggtagaaataattgctactacttaatctctttgccgccgaaacccaagtcggaatgtgatggctgtccctatgggcgagatcacccgtgcattggttggtgtacgaagaaggttatgcgtgaagtggggcttcgttgatatggatgtgtatgaacaggaataccgcttctactattttgcccgatgtccttacgaaaagacggatacgactttccgcagcattccgctgacaacagaaagttttccgcagaaagaaggtggtgaagccgtgtgagttttgattatttttacggtcagcaatccgatctattcacattctatcgagttccgaaggtgttgttcacgaacgagaggttctggaatatttctgccgatgccaagatgctgtatggcattttgcttgaccgcatgagcctgtctgccaagaatggttggatagataaaaacggtagagtgtatatcatttttacaatcgacgaagcgaagatggctctgaactgtgctgaacaaaaggctatcaagctgctcagtgaacttgagaagaaagcaggattgattgaacgtaagcgccagggtttgggaaagcccaacctgatctatgtgaagaactttatctctgctgtggattcacaactcttgaattgtgaaaatcacaattctggaacaatggaaatcacaactcaagaacttccgaaatcacaatgtaataatactgatattaaaaatactgaatttagtgatactgattctatctttccttccggaaatggtggaatgatggacgagaatgaccggtatcaagaatactttgattatttctcggatcagcttagtatggatttgttgaagaaggattacccttacgattccgaaatgctggataacattctggagttgatcgttgaaacagtttgcacgaagcgaccgttgattcgcattggtgcagaggagcgtccggcagaaattgtccgcagtcggtttatgaaactgaatgccgaacacattcgatatgttatggactgcttcaaggagaacaccacaaagattagaaatatccgtcagtatatgctgactacgatatacaatgcgccgacgacaatagacacctactacgatgctcttgttcggcacgatatgtcacacggatatttggaaggaggatttaagaaattgaaaatgaagcgagaggaaggagagtgacgataaatgtcgaaaaaagcaaccatcattgcggtggtcaatcagaaaggaggcactggaaagaccaccaccaccgagaatctgggcgttggcttggctcttgaaggaaaaaaggtgcttctggtagacaccgatccccaggcttccctgacggtcagtttgggcaatccctgcccggatgatctgtctccgacactttccgatctgatgggaaagattatgatggaaaaccctattactcccgatgaagggattcttcatcatccggagggcgttgatttggtgccgtccaacatcgaactctcaggtatggaggtagcactggtcaatgccatgagccgggaaaccattctccggcaatacctggatacagtcaaacagaattatgattacattcttcttgactgtatgccgtctttgggtatgctgaccgtcaatgcgttggcagctgccgacaatgtgctgataccggttcaggcagcataccttcctgcaaagggtctggaacagctgcttggaaccatcaacaaggtcaagaggcaaatcaacccgaaactgaggattgaagggattcttctgacgatggtggacagccgcaccaactactccaaagacatcagcaatctgattcgggagagctacggcggaaagctgaaggtttacaagaccgacattccccgctctgtccgtgcagaggaaatcagcgcagagggaaccagtatcttcaagcatgatcccaaaggcaaagttgccgaagcctataaaattctgacgaaggaggtgttaaacaatgcagaaaaaaggcgcaaacatcagcttgaaggggtacgatgatattttctccaccgatcaatccagagctgaagcccagcaggagcgtgtgcaggaaattccgctttctgagctacacccctttgagggacaccccttccgtgtggttgatgatgaagaaatgatgaaaacggcagagagcgtccgagatttcggagttctcactcctgcgattgtccgtcctgaccccgacggtggttatgaaatcgtttctggtcacaggcggcaccgggcatcggagcttgcgggtaaggaaaccatgcctgcgattgttcgtgacctggacgatgatgcagccattattttgatggttgatgcgaatttgcagagggagagtatcctgccgagtgaaagagcatttgcttataagatgaagctggatgcgattaaacatcaaggtcaacgcaccgatttaacttcatcccaagttgggatgaagttgcaggcaagagatactgttgatactgcatccttgttgcataaaatataggatttggtcggtaatttcatccacagtcaagtttctgcgtaatcccaaagtccctgttgcgcaaaacttacaaccgaagccgcaaccgctttgagatgaaatgcaaaaggagttccagccctctttataaaacagacccaccgtttccacacggtttccgtccgacagttcaaacagcaccttgtcagtttgcattgatttctcatgatggatcgccttgatctccacaacagtttcaccaaactgctccaccaacttttcgcgcagcgtttttggaagcaacttcatatcttcaaaacgcataattccttgtaggaacacagcatcaagcagttgcttataacgatactcaggtaagcgcatatccgctatgagctgtttcatttttttatacttggacataattatattttctccttcttatttaatcgcaatctttcctgtcttggttcacctcgtccataatgcgataaagtttctcgatcaagcgacaattatatttttcattcaatattgttgccacacttaggacattttcctacaaggggtcccgagcgcttagtgggaatttgtaccccttatcgatacaaattccccgtaggcgctagggacctctttagctccttggaagctgtcagtagtatacctaataatttatctacattccctttagtaacgtgtaactttccaaatttacaaaagcgactcatagaattatttcctcccgttaaataatagataactattaaaaatagacaatacttgctcataagtaacggtacttaaattgtttactttggcgtgtttcattgcttgatgaaactgatttttagtaaacagttgacgatattctcgattgacccattttgaaacaaagtacgtatatagcttccaatatttatctggaacatctgtggtatggcgggtaagttttattaagacactgtttacttttggtttaggatgaaagcattccgctggcagcttaagcaattgctgaatcgagacttgagtgtgcaagagcaaccctagtgttcggtgaatatccaaggtacgcttgtagaatccttcttcaacaatcagatagatgtcagacgcatggctttcaaaaaccacttttttaataatttgtgtgcttaaatggtaaggaatactcccaacaattttatacctctgtttgttagggaattgaaactgtagaatatcttggtgaattaaagtgacacgagtattcagttttaatttttctgacgataagttgaatagatggtatggatttctgggcaacattggaacatcaacttcgctataaaaaaggaattgaagaaatgcctggctatgatgagataagtgaagaattacttcattctgcaagagctatcattgaagcagataatgaaatgcagagaataaaagacaaaattggtatgttccacgaaatttagggagaaaactgagcaagtaggaaggtggaatatatatgaaacaagatactttagagggcaaagcaaaaacaaaaaatggggtaaaacggctgtgtttttccataatctgcattcttctggaagtgatttttattattactatcgtaacacgcttgaatgaatatgcagaaatcataaatttatttacaaggattttgagtgggatcttggttttgggattgtacgcatcaaataagacatcctctatgaaaatgccttgggtcatcttaattctaattttcccaattatgggtgtaggcctgtatttgttgattggtttgaatggtggcacacataaaatgcgtgagcgatatgcagaaattgatagcaaattgttaccaatgcttccggacagtcaggagtgtttgagcaaaataaaagaaacaattccgaaagcaggaaatatagcaagttacatacaaaaaaattcgcagtatccaatctatcagaatacggatattgtgtattttgatgaagcagtgaaaggattagaggcacagcttaaggatttggagaaagcacagaagtttatctttatggaatatcatgcgatagaagacgctgaagcatggcataagattcaagatgttctggaagagcgagtaaaagcaggtgtggaagttagagtattctacgatgatatgggttctataggctttattaacacagattttgtgaaaaagatggaggcaataggaattcattgtcgtgtattcaatccgtttatgccaggtttaaatctgtttttgaacaatcgtgatcatagaaaaataacagttattgatggaaaagtcggatttacaggtggatataatctagcaaacgaatattttaattacacacacccgtatggacagtggaaagatacaggtattcgtttagaaggagatgctgttcagtcgcttacggtgacatttttggaaatgtggaatgcagtaagtgataaggatgctaatgattctgattttagtaaataccttttccactatgattatgcggcacagcaaactgggtttgttcaaccttatgcagacagccctatggataatgagcaagtaggagaagaagtttatatcagtatgataaataaagctgaaaaatattgttggtttatgactccatatctaatcataacagatgaaatgacgcatgcgttatgtctggctgctaagcgaggggtagacgtaagaattatcacacctggtatccctgataaaaaattcatttataatataactcgttctttttatcatggattagttaaacatggtgttcgtgtttatgagtggactcctggtttctgtcatgcaaaaatgagtgtggcagatgactgtatggcaacttgtggaacaattaatctggattatcgaagtttatatcaccattttgaaaacggctgttttatggcagattgtcaggcagttgtggaaataaaaaatgatctgataagaacgatgggagaatgtcgtgatgtgacagaccaatatcaaaccggacgaagtgcatatttgcgactgggacaattatttatgagattatttgctggattgctataagaatctgatgaaacgacctttcaaaaaacagttgatttagaagttaactgtttttgaaaggccgtttttgctatatctaacagtctgttgtacaaagaagattttgcatggatgaaaaaacaaacgttgttgaggttaaattgagttttccattgtattgtattgctaatgaataagaataagaaaaagaacagacaatgctgaatgctctggaaacaagaatatctgagtatagtatgtaagttcgtaacagaatgaaaggagcgattcaaatgagcaatttggaaaattatatgaaacagcaagcaattttttgtgaacaaaatgatagcattagtaagaatctgtattcagagtatggtgtaaaaagaggcttacgagatgaaaaaggccaaggtgtgttgacggggcttacaaatatttctgatataaaagcttttgaatatcgtgatggagtaaagagtccatgtgatggcgagttatcttatcgtggttataatataaaagatttagtaacaggaagtaaaggaaaaaggtttgtctttgaagaaggagcatatcttcttttattcggagaattgccaactgatacacagttaatggaatttcagggaagactatctgattgtatggaactaccgactaactttaccagagatgtcattatgaaagcacctacatcagatattatgggttctatgactcgaagtattcttacattgggctcttacgataagaagaaagaaagtcttgaaattccgaatgtgctaaggcagagtatgcagttgatcgcagcatttcctatgttagcagtatatgcataccatgcttattgtcattatgaaaaaaacgaaagtatgtatattcatagacctgaaaaagatttatctattgctgaaaatttcctgcgcctattaagaccagatacaaaattcacagaactggaagcaagagtactggatatagcattattgttacatatggaacatggtggtggtaacaattctacattcactacacgggtagtaacatcttcaggttcagatacttattctgttatttcagcagcaatgtcatccttaaaaggaaaaaaacatggcggtgcaaatctgatggtaatgaatatgatggatgatattaaaagtcatgtgaaagattatgaagacgaagaggaaattgcatcatatctgagtaagattttgaagaaagaggcgtttgatcagaaaggacttatttatggaatgggacatgctgtatattctatttcagatccgagagaaagggtgttcaaaggctttgtagaacaactcgcaagggataaaggacgtgagaaagatatgaccctttataacaatattgagaagattgcacctaagttgattgcaaagcagcgtcagatattcaaaggagtaagtcctaatatagatttctatagtggttttgtgtatgacatgttgaatattccaagagaattgtacacgccattatttgcgatagcaagaattgctggttggagtgcacatcgcctggaagaattgataactacagataagatcattcgcccggcatataagagtctagtcagcaaaaaagaatatatagaaagagaggaacgataatatgggagcaggaaccagtgcagaggagttttttttaaagagcatcaatgttgaaagtatatttgaatttgttgaaagaacagattatttgtttctttatagtataaaggaatgtgttgaaaaatcagactgtcatgaaggagtatatctttcagaagtggcagaatacatgaaattatcgattccagaaacatctaagatggtaaaaagtcttgaaaataaaggatatattatttggaaattagatgaaaaaaaagaaagaacataccttgttttgacgaacaaggcaattgaattaagtaattgtcagaaagaaaaaatgatagaagcttacgaaaaaatcatatcgaatatacaagaagatgacctggcagttacacggtgtacattgagaaaaatccgacagcttatggaagaaataaaatagtgattaatacaacggagtaagaaaagctccttcatatattagaataaaaatatgactgtttctttaaaaagaagccggtcatattttttataaaaaataaattttgttgaggttaaattgagattgactttgtattgtataagtatgaaataaaaaggaatcaggtgatgtacaatgaaaaagcataaaatatgtaaaatccttcttgttatactggcaatttttttatgtgtggctttttatgaattgctcggaatctgcgttgcatataaaaagcagccggaagtgtccaatacaaccaaaaaagaaacaaaaaatgggtcatggaacgaatgcagtgaaaatacagaacgggcagtaatcatagaaaagaatccagaagcgcttttacaaagagtgcgtttgatcaagaatgcaaaaaaggaaattattctttctacttttgcatttcaatccgatgaaagtggaaaattgattttaggagcactgcatgatgcggcagacagaggtgtacatattcgtctgttagtagatggaatggagagctggattgatatggaaggaaatccgtatttctatggattatcttcccatgagaatgttgaaattaaactgtataataaggccaatccgttgaaaccgtggaaaatgatgggtagaatgcatgataaatatttgattgcagatggaaagagatatattcttgggggaagaaatacatacaattatttcctgggtgattttccgggacataagaactatgacagagacgtgttagtggtttgcgatgaacctgagaaagaaaattcagttaaccagttgtcagagtattttgaaaccatatggaatcaggaagacagtggttattttcataacaataaaaaactggcaaatagaaaatctgtaaagaacgcagttttagagctacagaacagctatcagaaatattttgaagagaataaggaaagaatatgcgagaccaattatacggacgaaacttttgagacagaaaagattacattagtgtcaaatcctattcatacaggttccaaagaaccagtagtgtggtatcagttgggagaattgatgaaaaatgcaaaaaatcgtgtgaagatccacacgccatatattatctgtaatgatatgatgtataatacatgggaggagattgcagagaacgtttcagatttttctatcatgacaaattcagttgcgaataatgggaatccatttggggctgccgattatgcgaaaaacagaaatagaatcttaagtacaggaattaatatctgggaatatgaaggcggttattcataccacggaaaaagtattctgattgacgatgatctgtctgtaatcggttcctttaatatggacatgagaagtgcatatctggatacggaactgatgcttgtaattcgcagtaaagatattaataaacagttggaagagggcatgatggaatatgaaaaagtgtcccgccagatattagaaggcggaacttataatgatccatatcatgtagagccaatcgaattaacaaagaaacgtcagagaaaaatatttttggtacagcatctgcttggatgggcaaggtatctgttttaataaggaggaaggaaaacgtgtttcaaatattgattgtagaagatgataaagaattaagccagctattccaaaaagtgcttgagaagaatggatatcaagtcaaaagtgcatcggatggagcacaggcattagaagtattggataaggaatatattgatctgatcatttctgatattatgatgccggttatggatggctatgaactggtgtcagaacttcgttcagcaggatatcagataccagtgcttatgatcactgcgaaaggttcctttgatgatatgcgccagggatttctttcgggaagtgacgattatatggtaaaaccggtaaatgtgaatgaaatggttttaagagtcggagcactgcttcgccgtgcacagatactgaatgaacacaaaattgtgatcggttcaacagagtttgattatgatgcaatgacggttacaactgataaggaaagtcttgttttgcctaaaaaagaattcctgcttttatataagcttgcagcttcgccaggcagaacatttaccaaacaacagttgatggatgaagtatggggatacgagacggaggcagacccacatacgatagaggtacatataggaagaatcagagagcgttttaaagataaccctgattttgaaatcgtaacaatgcgtggaattggatacaaggtggtgaaaaaataatggaacaaaagaaagaaaaaggattgcggatccgatcctgtctgactggtgcaatctggctggcacttgtattttcaacagtcatatctgctttattatttgcttttttgaatcatttttttaatctgccgggcagcatacctgtgcttggctggcttttaattttcaatacattgattgcagggctgatcacttcctttattaatgcaaagttactggaaccaattaccagacttggtaaagcaatgaaggaagtttctcagggagattttgaacagcatttggaaacgaacagccgtatagcagaagttggagaatcttatcaaagttttaacgttatgacaaaagaacttcgtgcaacagaggtgctgcagatggattttgtatctaatgtttctcatgagtttaagaccccgattaatgccattgaaggatatacaatgctgcttcagggagaagaactgtctccggatcaagaggaatatgtagaaaaaatcttatttaacacccaaagactttccggattggttggtaatattttgctgttatccaagttagagaatcagaatataccaatgaaaaaaacagaatatcgtctggatgaacagatccgccaggcatttctttcattggaaacaaaatggacagaaaaagaaattggttttcaggtagaattggaggaagttaaatatactgggaatgaaggactttttatgcatatctggataaatcttttggataatgcgattaagttcagcccttcaaaggggacaattacgatgtttctgaaacaagaacaggattctgttaagttcattctggaagatgaaggaccaggaatagaggatgatgtaaaatccagaatatttgacaagttctatcaggtagatggatctcataaagcagaaggaaatggcctaggtcttgcacttgtaaaacggattgtagatagtgccggaggaacaatcaaagcagaaaaccgtgaatatggtggatgcagatttgttatagagctgccaaagcagaaagatgagattatatagttttaagataaattagaagatgggaggatttatatgacattttatcaggagttgcagttaaatcaggcgggttctaaaaaactgttgaaaaagagtgaaacactaaaagaaaaattatatcatatgtgggtatatctggtgaagatagctgttacaatggcattttgttttttctttgttagtattttcagcatcctatttggaaatgagaacagcattgtaggtgtagtagtcttattatgtctcatggtgtttagaaatgcggatctggggatccacaccggacaatctacgatgcttttgactttgttctttgtaattatgactgtatgtccgcatttagcaaatcagttttcaccggtattgggaatgctgttaaatattgcggcactggctgtgttgattctgttcggatgccataatccattcatgtttaatcaatctacattggttcttgggtatctgctgctatatggttatgatgttacgggaaaaagctatcagatgcgattagtcggaatggctttaggtgcagcacttacctgcttcgtattttatcgaaatcataaaaacagaacttataaaagaaatctgaaagatctgatacaagaatttgatatcacttcttccagaacaaaatggcagatatgtcagattttatgcgtaccgattgtcctttgcattgcagaactttgtaatatgccacgtgcaatgtgggctggtattgcggccatgtccgcgattttgccgtttatggaagatatgcactacagagtccgtaaaaggattgtcggaaatattgcaggtgttatatgttttacagtattatattttctgcttccttcgtcaatctatgcatatataggaattcttggtggaatcggtgtaggattttcagcacaatatggctggcaggcagtatttaacacatttggtgctttagccattgctgcagagacttatggactacaaggagcggttagtcttagagtgattcaaaatgtttttggtgttgtgtttgctttagcattttgtgttatattttattggtttatgtctaaaaaaaaggaaagtgaggtgaccgtacatgcagagtgaagtaaatcaggaagaaaatttgaatagaattattacggttcctaatcttctttctttttttcggctttgtctgattccggtaattatatggagttattgtgtaaagaaaaatcctctgttagctggtgaaatcttattgctgtctggtcttacggatcttgctgatggatatatcgcaagaagattccataggattagtaatttaggaaaaatacttgatccggtggctgataagctgacacaggcagcgatgttaatctgtctgtttactcgttttccgcatgtgcttcttttaatcgcaataatggcaggtaaggagctgtatatggtagtcagtggatgtcttgtgatacaaaagacaggaaaagtacatggtgcagactggcatggaaagatagtaacctttttattatatggaactgcagcggtgcatattatatggttccacattacaccgatggtatcagatctgttgattggtttgtgcgctataatgatggtcatatcggtcgctctgtatattatccagaataccaggactcttaagggagagactgtataagcaattttatattgcaatgactagaaaaatatttaggagaagatagatataaacgtaaatggtgaataacccgtcaacttcctgacatctccaaaatctgggataatggtgtgtagagtgtaaaaagtgtgtttcacactttttacgaaaaacaccacaggaggtattgatcatgaacaccaagttagccaccagacaaatccgattgaacgaatgggctgcaattataaaagactgcaaagccagtggccagaaagttgatatttattgtgaacagcacgggttatccagagatgcctattattattggctgcgtaaagtaaaagaagcagctttaacacaggctggttttgtagaacttcctgctctgacatcagaacagataccagccaaaacaattgaaaaaggaacctctgcatttgaaactcagatgattattaaaataaatgagattgagttctgtgtgaacgaaaactcgtcatcagaactaatatccagaatgctggaaatcatacgtcatgctcaatgatgcttccggcttccaacacgtttacttatgtaccggatatacggatctccgaaaaggaattgatggattgatctctattgttactggaacatttggcctggatccaaccgaagcgggatccatctttctgttctgtggacgcagaaatgaccggatgaaagtcttactctacgaaggcgatggctggcttctatgctataaaagatttaccgatggaaaacttcaatggccaagaagtgaaaaagaagccagagaccttacccctcaacagtaccgatggctgatggaaggactttccattgaacagaaaaaagtaatacacaaggtgaaaccagagctttattagttctgttttatatatgtacattgacagttttataagttatctaaatttccctgaaatgcctgaaataaagggtttttcagtgccatctgtggtataatggattcatggaaaacattactttaaccctggacgaactgaataagatgccgaagaatgccatagcattgctgtacatacagatgagcgaaagctttacgattttatctgcacagagccagaagatccaggatcagaatgaaaggctgatccatcagattgaagatcttcaggaacagattgcgatcctgacacaacagcgttttggaaaaagaacggaaactgacaaacaggttatgggacaactgtcgttttctcttgaaaacatgtgtgtcctgaatgaagcagaggcacttgtagaaaacggtattcctgatgaacctgacattgaaaaagccgttgtccgcagaaagagaaccaaaggaaaacgtgacctgaatcttcaggacatcgaagttgaagtgatcaaccacgattgttccgaagaagaattacgggaacactttccaaaaggatggcatcctatggaagatgaagtatataaagaacttcagtatattccagccagatttaaagtattggaacatcatatcaaagtatatgccgggaattctgattgcggcagttttctgcgtgcaaaagcaccggaacgtctgctggcacatagtattcttaccccggaactggcagctgccgtgtttaatgcaaagtatgtaaatgcggtacctttgaaccgtctttctgaagaattccttcgaaatgatgtcaacattccgcggcaggatatggcaggatggatgatccgtctcagtgagtattatctgcagccggttcatgatctgatgaaagcagagattatggaatcccaccatatccattgtgatgaaacaccatttatcatgcctcagcacagcaaggaatatatgtgggtgttccattctcctggtggaagcgatacccatccactcttcctatatgaatatctgggtggcagaagcggcgaagtcctggaaaaatatctatccggatatcaagggacactcgtaaccgatggttaccagccgtatcatacgcttatgaaaaaaagtgataggatccaggtggccggatgttatgctcatgcaagacgtaaattcacagagatcataaaagttgtgaagaagaatacgccgctcacgccaggacaggcagttgctgctgaagcagtcaaacggattgacgcgatgtatcatttggacaacatgtataaagaatcatcggcaaaagagagattagataacagacagcgctctgtaaagcctcttgtcgatgcctattttgcgtggctgaaaacattacagggaaaatcaaacgcaagctccaagttaaaagaagcaatcaattattcgatcaatcaggaaatataccttcgaagattcctggaagatccgcttcttccgctggataacaacgatgcagagcgtagtatcaagtctttctgcgttggaaaacattcctggcatatcattgattctacaaaaggagccaaagcgagtgctctcttatacagtattgcagaaagtgccaaggcaaacagcctgaaaccatacgagtacttctgctacctgttgacagaacttgtgaagtatccacgaaacgatgttccaacagaggtgttaaaaactttaatgccatggtctgaagaactgccggatcactgtcgaaaaactaaatcaaggtaaagctcagtgccagccttcgggctggcatatctttttcgggaggacgagttatttaccatatacatataaacagtaagtcaaacacacaaactatggagtttttagtcggtttaataaaattttagatagacaataaatcattataaaaagatcctgttcatactatgatatatagaacaggatctttatttactttatttcgccaggaaattgctctgaatctccatcggcatatgataagcctggcctcgttttgtcaggctgtataatttaaagctcattagttccggagtcgcattcaatgaactgcagagtccgaaataatccaggtcctcgttctgaaccatggggaagtacggagcaactgcttccatctttttatctagaagtagcagtaagtaaatccgagtaaaatatggtcaaaaaatcatcgatatccgacctacagcacgttataatatagttaatctaataagaaaaccaagtgatcattgttacgaagctgaatcgtaatggtggccaactgagtgaactcgatggaacggaatggttatatcctccgggtgctccgagcaccggacgagcaccgaaaggtgctttacagagatgaaaacaggttttcttattttgacagggagtaacagaatagttaggaaaaccaaggatttccttgacttaggttgactaatcattgtatgtatttacagtggtatctcgagctcctaagcgaggggtcggaggttcaaatcctcttggcgacgggcttcaaagcgttcgaaaatgttagctggattagctgacaacgaacgcttttgttattttctaaacacgttcgtgacacaaaattccattcaaaaggatcaatttccagctaacattttagttttgctctgtatttgtaccactctatataacgaaacgctcagatgctgttttgcagtaggggaaaagaaaaaatatcaaaaaattgatgattaatggtgagcttgtgatagaatggataaaagagaaaagcataaaggatgtagttgtggagaatatttattatgattagaaagttgctgaacggagatatcgatagagtcgctgacatatggttaaagacaaatctgaaagcacattattttatttccaatcaatactggaaaagtaattatgaattagtgaaagaaatgatgtcacaatccgaagtctatgtgtatgaagatgataaaatgattcaaggatttgtaggactaaatgctgaatatatcgaaggtatttttgtctctgatgaaatgcagtcatgtggcataggtaagcttttattggattatattaaggataaaaaagtcagcttacgattaaatgtatatcagaagaatgccagagcaatttctttttaccaaagagaagggttcactattcaatgtgaaggcttggatgaagctactggtgaaaaagagtacactatggcatacggtttaagcaaatgaggatttgtcatatgtgggctggtgcaggaaaaatcaaatttggaatttatgcatgcagtccggaagattcatcgtttaaagcggtatttacagatatgaaattgacggagtgtcaatggaaagcccacgacggtcaaaaaccggatgagatgtagcagaatgtatttgatataaaaaaccaatatgaaaatagttaaagtttttcagtttgtgtaactgagaaaaatgaaaattgcggaggtggatttgttgaaggaaagtacatatcaaactccttgcggaacaattcactattggtcaagtattctgagtttggatacaacgacgcttgtatttcttccggggctgactgctgaccatagactgtttgataaacaggttgcgtacttcgatggaaaatataatatcattgtatgggatgcaccggctcatgcctcttcctggccgttccggtttgattttgacttgtttgataaggcaaaatggctgaatgggattcttgaaaaagaagaaatcataaaaccaattataatcggtcaatcaatgggaggatatgtaggccaggcttatgcacaattgtatcctgaccggctggcaggttttatttccattgattcagcaccgctccagagaaactatgtgacagcagtggagatctggcttctgaaaagaatggaaccagtatatgcacattacccatggaagttgcttttgaaatccggaacaaagggagttgcaacttctaattatggcagaaacctgatgaaggaaatgatgctggtctatgctggtgatcagcatcgttatgcacaaattgccgggcatggatttcgtattctggcagaggcaatggaaaaggatctgccttatgaaatcaaatgtccttccctgttgatatgtggtataaaggatcatgccggttcatgcataaggtataacagagaatggcatcgaaaaacgaaaattcctttaaagtggattgaaggggccggtcataattctaatacagataaaccggatatgatcaatagtttactagaagagttcttctcgaatattttatgacaggcaacctaatgattagcgcctattaggaaaacacactgtcaaaggggttcgtagcgggggttagcccgctactgcgttatcttccgtagtgttgatttcaatgtactcggcaatcttgcggagctcgtcagcaaatttgaatttcacgctgatattgccgttttcatagaccttgatatagtccacaagttcaaccaagatttcacggttgagggcttcaatgttctgatacttcataaaggctaccagtgcaggatgctcgttgtccacaccgtttgccagttctgcgcgttcagcgttcagccgggtaagcaccgcggaaatatcagaagtctgccgttcatagtcagccttcatatcccggtattcctgctgggtgatttcaccgtctttccagtcctgataaagagattgcttgtagcgtgttatctttgtcagttcccgctcttttgcagctatcagatcgtccagtcggtaagactggctttttttgattggagcggaattgatctgcgtgacgatttccgagtaggaaacagccaaatgtacctgatgctgtacagcgaacaaaacagcagcctccagccgttcatgcttgattgagtgcatggtgcaggctgtccgggaacggttcttgtaggttgagcaagaataatatacattgttgttcttgccaacgcatcgggtaatggcccgcccgcaatcggcacatttcagaaagccgctgaataaatgtacctcacggcctttcggggaagtacgggtatcacgctgtaagagagcctgtaccttgtcgaaagtttcatagtcgataatggcctcatgcgttccagccacttccacccattcctcgcgtggaacagcttcaatctggtgtaccttgtagcttttcacccggcttcggccttgggctaaatccccggtgtaggtcggattggtaagaatggagtggatcatgcggactccccacataggatcgtcataccctcttgtcgaaacaggcaagcccttttgtaccttgtaagccgaggggctcggtacgccgtgttcgttcaggtacagcgcgatagcacgttttgatgacccttgaataagcattgtgaaaatgagtttgacattttcagcagcatcgggatcaacaatcagcctgtgcttgtcctttgggtgctttatatagccgtaaggagcaagtctgcccggtaatggtcttgtttgcaaatccactcaaaaccacaaaggccagaaaaatcggcattttggacagaatggattccagaaacgcacaaacaaatgcgccctgaatacggctcttataacggccggaaagtttcaatattcttgaaaacaaagcaaacatttatttcccctcctttgcagtgtgtactttccactcggcgctgtcttgtgccgctttccacaacttttgatattcagggcaggactggatcagctcttgatgtctgcccgttgcaaccagttttccgtgatccataacacaaatctgatctgcgttcataatggctggtaatttgtgtgcaataaccacaagggtcttgttctgtttttttgctgagcagaatttcccgcgccattatgcaataccggcacgctggaagtgctttttgcaaatagctttcccaatcacacctccgacaaggccaaacacaaagcaggcaaccagcagaataggcgcaatccacataggcatatatgtattaagggtagctgcatattcagcgccgtatccttcagtcaacattaccatatagctttcacggttcaggaaaatgggagcaaagttgccaaacacccagatgctgaacacgccgcaggaaagaactgtactctttgcacttttgtagtccgcctttttcaggatcacgtcggccaacaggccgccaacgagaccagttaccatagtaagatagccgttgccgaagaacaccatgattaggccaatcaggaaacccatgattgcagtcatcccgaattttttagcctttgtaacatacagcatataggggatgccgccaatcaaagggcacagcaccgccatcagcggaataaaaatggggataaagccaagcatcgccaccagcataacaatcacgacatagatgacggtgtagatgccgatagtaattaaatcttttccctcaagccgggaactttttttctgggaactcataccagtatcctccttatatctgagaaaatgaaaatgtggtgtggttagagtgttctaaccacaccacgcattttagcaatttcatgcccaatatccaacccaaaagcaatttcattctacccaaaatcggtatttattttgggtatgcaaagcacctatttgattcggctggcctctcgataatcttttggcataactccatactttttcttaaatgcagcagaaaagttgctgggctttgtataacccacaagaaccgctatctgcccaatgttcatattgctctccaataacaatcctgcggctcgctctaaccgctgctcaataacatacgcatgaaccgaaatgccgtacatcatggagaatccccttgataatttagagacgctgatttgaacctgccttgccagtccttcacagcttggcgcaaaggcaagctcgctgtcaatgattctctttgcctcgatgatgcaatcacgttcactttttgatatgcagcagtattccggcgagaggattcgcagctccaacacttcgctcaaatatactgacagcaattcgtggattttgctttccagaaacagatacccaagcccaccccgataatgtgtaaagtcttgtaactctgcgaaaatatgctccatatagggcgttatgctcacctttgaaattccggtcagcagtttcttttcatagacggtaatctcgccatcctcgaagtagtcctgtaataaacgtttgaaatatggaacgggaattttgatgttcttaaaatagaagtcgctgttttgcgcataacagagagactccattttcccgtgtccacggtaaatgcaggattctccctttgcaagacaagcgccctctctgctgcctgcaatattccacgacacgccgtcgttcaggcagaacagcatttgaatatagtcctcgctgttaatcccgcgcacattcatgtcagaaaaataattcatcttccagtctgaaacaacggcaccctgttttgtcaccacctgcgcaatttgtccggttcccatatcagaaggaatcgggatcgttacggtctgcggtgaattggagagcagatcccgatagaggttgttcatgtattcgcttgtcattggatgccctcctttctgggttagccaaggctaagcatataatactttatattttgatggcagtcaaggtagggtcgccaattgctaaagtgaaattaaatagtcagtagtatgaaatagatagtcgttcaaataatatcacatgaaatgtaaaatcatatcaggtgatgttatgaagatagaacgagatgaaagacgctttgattttcacgatatagggctcgccatcaagcgggcaagagaagccagcggcatgacacaggagcaactggcctatattgttgaccgcgctccgcgtaccattatgtataatgaaaatgatggtcagcatccaagcttcaacaccttttatcagatggtcacaatgtttgatatatcggtggatcaatacttttacccgtcccaaaatagcgggagcgagtgcagaaagcggattgatgccatgttgaacgccttggacgaaagagaattgaaaatcgttgaagctacaatccaagcgatgaaagcatcgaaagaaacggaggaaacgtaaaagaaagcgtaacctccgtttttttgcgccatgttgcgggttgcgcgttttggcaagcaattcgggtgtggccacactccgaaatttttgcagggcgcagggcccgcaaaaatgcttgttggggagctccccaaacccgctgtacttcgggacaaattgtcccaaagtcccggtgcgctgcaccgtagtctgcggcccgtcactatcgttcctgggccttattttcacgctcgtctgttatgccgagcagatgatcaatgttcgcttttattgctacggcctcccgcatttgccgctgggcatcccggtattctgcataaagctctttcttttgtcgcgccagctcacggcgggatttttttagtgcttctattttagggagctttgcgccgttcagtctggtgttcatggtatcctttgccgcccggtaagtggcaagctccgtttcatgctgggccagatactttttgctgtaccgtgcagccttgtacccgtcgaacaccgggcgggtcttggcatagtccaccgtggcagccatcagctccgaggttttggaaagagcctcctccgttgtgcggagcttgtcagacagcttgtgaaagtgatccaccgccgcctcggtgcgggccgtcagcgccgcatagtctgtcagatgatgctcctgcaaatactggagcgcggtagccatctgttttaggttgtagaccttggcccatcgttcataggccgggcccttgccctgggccatacgctcttgaatgtcgatgatgagatcaactcgccgtggcggaaccgtgagctcctctggcagctcagggagcggacgttctccggcaattaccgccttgatgtcctccgggtcaaatccggctcccagtgtagaagcccggagccgagtcggtttttcctgcccgggcgcaaggaatgagatgacaccgccgcgtccctgtttcaccgaaaagccggactcctccatgagacgaagaaagtcggcaaagtctgtgggctttttctccaaagccgcgagaatagccagccgtacccgctgcttggcagagggtggcttttctccgatccactgtccatagtggagaaaacggcccttgctgtgctggcacggattttggataacagacaattcatgttcgatgcacacgcggtcagagagccgccgcagggcaaaggacgaaccaatgaaattatgaaatttccgggagcagtcaaaggccgtcgcattgaaataaatgtgattgtggatatgggccttgtcggtatgcgtacagacgaagaactgatactttccctttgtccagcgcatcgccgtttcatagccgatacggtttgcttcttccgccgtaacctccccgggcaggaacgcctgccggatctgaaagaacatggccccgcgagatacggcccggcctgtctctgcaaggtattgactttttaccagaagaaactcggcgggagccgtgttcggatcgcagagataggaagatacggctcccagcttttccgggttcaggccataggtgaaacgatcctccatcgtttgaattgcactttttcccgccgctgttttataagggcggatgtaggtggtcgccgtagaaatccctccttccggcaaatagtatttttactttgggacactttgtcccgaagtagaaaaatccggggagcggtatcaaccactccccggattggtcagagctctaccaacgcggagagctgtttcaagagatcagacagcggcccccacaaagcggcatagtctcgctgcaaggccgcgagttcttcgggataaattgcgccgtaggtgttggcttgaattgccacttggttcagattgttggagcatcgccgctggagcgaaaccagctcacgaacaggcaaaaggtcaacatgaagcacatacccactcagggccattttccgcatataggctcccatgttacggatgccagcctccgccatacgttcttgaatcagggcctgctcctcctccgacaccatcacatgaagatggatcggacggcggcgtttctttgtcatcgttcctcacgctcccggctgcggcaggcgcggggcggctcctttaccttatccagcggcttttcctgttcgtctaccggaacagggcgcggtaaatgaaattcacggtgcaggcgcagcacctccagtacagacaattcctgttcacgtttcttttccatatacgcacctccttatctatcgccacggtcaggctgcctccgttggggagccggagcctccgagccgcgatctgcctccgccaactttgccgcatttttcatctgctcggcaatcggacggggcctgtcgggattatcaggcgcaggacgcagctcatagtcggatgcctgtttttctgtcagggggcgggtataggtaagatagccccaagccaggaacgagccattttccaccgggatgcgctgatcgtaattgaagatttcatccggcttgttataaggcggcttcgggaatgtcccgatgtccacaggccgctgggtcgaataatacttgtaaaggccgggagcctcggtctgcctgatccccacgttataaatacgctgatagtcctgcacccggtctgcaaaatcctgttccatcgcggtgcggtcatttccatagtgaccccattcgtactgccgctggccgtccttgtcatcatagcaggcccatgtgacatagcgggatggcgcggtgggatgttcgcccaatgcaaatccccgcccattttccagcatgaccgccttcaaaatagcatagccttgatttttgtccatagtacacctcccatcatcgagacatttctttgttttctcttttcacaaacggctggagctgataggggcttgtaccgtcctcgggccgcagaaagtctatccgggccgcagcacggatggcgttctggttaagctgccgctgccatgccccttggctgggagcccacttaaagccgttgcttttcagttcctgccgctgattggcatcgggcttttcctcaaaaataagctgcaaacgattttcagcctcgttgatttttgcctcgcctccggggaatgtccagcctgcaaactcggagcggctgctcagttcctcaatgcgctggcgcacacggcggatgttggcgttgttgttggaaagcagataggcggggtatggcttgcttttgtccaagtgccatgactgcgccatatctgctttgagcttttcggcctgctccggcgtaagctccgggcagccatccagcgttttgtgtttccgaaaatacgcattgaccgccttcatggtggcctgcagggactccagcccctccagcttttttgtcagcttttccacggccagatcgtcatccgcgctgatcccacccattccaacagagcggattttatcaagcagctttgaaatttccgcatactctccatagttgcgatcccgggcggcgttctgcttgtgcttttttgtcacagggaaattgccgcccccggagatcagaatagagggcactcgagcatcaatcacattgcgttcattcagattttccgcaagtttccgggcatagcgatccaccagagcgtcaatcttatcgtggtacatgggatcgacacgggctttctggcgttccgccgctgcatacgcttcatcgaccattgcccggtagctcgccgtagcggagcccggctgatagtcggaaaagctgttcatatcctttgcccgctttgcggcttcttcattgatcggataatatttcggcatagtacctccttccacaaaagccggaactttgggacaaattgtcccaaagccccggcagctaaaatgttgacagcatctcacggaaacagggccggacgtagaaatatacgcctcccgcagaaaagggccttaaaaagccttgtcacaggcgggttttggatgtcctaattgtcaacacatcagccccgttttttccgcatatattcccgctgctgtctgcggtgtgccgcctttgcacaggccgccgaacaataggtttgccgtccatcaggagccacggctctgccgcataccgggcaagccttgaaatccggccttggcccttctgccagcagcgcagcctccagcgccggatcaaggggcagaacagcctcgcggaagtagcggcaataagcccccgtccagcatttcccaaacatatagcactcgcaatccagcggcaggcagccgcagtcccggtcatagttggcacaccattttgataccagcctgcggattgccgttttttctgtccgggtcagttctcggcccacagcatcacctcccgttgcccggtggtttaagttgctcccggtagcagaacacgcagccgatcccgcgccagtaagggcagccgtcacaacgggagcccttcggcggcaggctgggcggcacacccttaaagtagcttttttctttcataaatccctcataggggttgttggtaaatctcattcattatcctcgctttcggtatcgtcctcgtcccaaggcggcccatcgtcctcgggatcgtcataatcagccagttcctcgctgtaatcctcttcgggtacagcagctttttcatgcttcgggcggtagattttgaagtaccagcctgcaccgctgcccagaacagccacagccaaaatcagcagaagcgtcccggtattacttttctgctggggctcgggttccggctcctccgcaggttccgtcaccggagcgggttcgggagctgtgccagcacactcggtcatattgaccgcgcagacctcgcaatccgtatggatggctccgggcgcacatttttctgtgcaggagcaggccggaagttctccgccagcggcctccagtgccgccagcagatcggcttcatccaccatgttcaaaaagtaggtgtgatactgttcgccgtcctcgtccacaggcttgtcatagtcaatgacaatgtaaaaggtgttgccgccgctggtttccaccgtgatgaactgtttgttggttgcggcatcgtagagcagatcgcgggtcacaaggtttccatcctccgaaaagccctcgcccggggtaatggtaggcgctggctccggggccggagtttcttccacaacaggcggttcctcattcccgccgtccgaataggcataggccgggatcgcaaagccgcataaaagaacggcggagcaaagccccgccgccaacatacgaaagtgtttcatattcagttttcctccttcttttcttcttcggacttcgggacactttgtcccaaagtaccgccgtccttcagcttttcaaacagcagcgggagctccgtaagggaaatgctcataccgcgcacaatgtccacgatctcgctgttttccgcctccagctttttctgctccagctccttgagccgggcctgctgttcactgattttggccttgaccttatcaatctcggcctgaattttcatgcttttggtagttgccatctcaaaacctcctgtcacggtaaacgcccgtaggcgtaaaaatgagattgccagtagctcgtattcaaatttgcgtagccgatgggatctccgcaatgcagcatttttccatcaccgacataaatcccgcaatgactcacgcctggcgtatcataggtgcctttgaagaacaccagatcaccgggtttgggagagctggtcggcgtacagatgttatagagcccctgggctcccagcctgcccacattccagccggagtgattgatgacccacgaaacgtagccagagcaatcaaaggaagtggcaggagaactgcctccccacacatagggatagccgatgtatttctgcgcttcagcaagcattgcagtaaaggtttcatcgtccagatattctgcgggcacttcgtagtcaccgggtttcccggtaatgtacttgttcacatagggagaatccgggaacagatcggggcggtttcccagcgttgccatatagatggcataccgggaaagctgatcctcgcctatgacatacacgggtacatgggataaatcaaagttctccagcgtgaccgtacagatgtaatagtcgtaaggcacctgataggtgtctgtatgggagttgccgtcctcgtccgtccatgtatcggtttctgtgcgataccgggtttccaccaccacatcctccgtgagaatgtactggcggtcaaacagcatttgcagcgttccctggacttcctctattgtccattgtccctcatggagcgcacacaaaagagaaagcagcacataggggtcatgttcgatttcgtccagatcgaagtggtattcgtcatagtcatgggtgctttcataggtgtccagataatgctgcaaatcatcttccagcgcacagtaggcagcttcggcggccagcatatcccgatcctcgcaaggataggtgctggcccctaatgcaccggccccggcgttccccagcataagcatggtagaggaacaggactgcatagcaaacaggagtaacacacagagcaccgcaaccacggcacctgcgggatgacttttgacaaattccactgcccgggcggtcaggcgttctgtggctgtggcagttttccccgccgcagccgcgccctgctttgcagcctcctttgcctgcttgcgatattgcctgcggagccgttgcttctgccagtagcgggtaagggcatttttcgtcagctccgggtgctcctgtgcggcggtgtgaaaatggtagtccgccgtgtacttggtatagcgggcctcggccttgcgtaccacttttgccggatgttcccggactttacggcgcacaaagcgggagccatgccgcagtgcggtttctcccacaagctcagaacggtgtgcgccttctgtgccgacattttcctgttccacttcaaaaatcttgccatgcacgaagctgtgaacggaaccactggcaacacggcctatgcgttttaccgggccgggctttttcggcggcttttgttttgccagcttctcccgggcctgttccagtttttcgccttgggactccatacggagctttgctgccgcagcctgttcctgctggctctttttgcggaacttggactttgggacactttgtcccgaagtgtcggaagcctccggcccggactgctcctcgtcaggggcgtgggcggtctgcgaccaagcctcctccttggccttattcgtttttcgtttcattcttcatatcctccgggcgggtagtcagcaggtcatagatttctccgcgagggaaccgatccacaaacggaatggttacatttccatagaacaacagcccctcgccggaattgctgtgtgtgatataggaaagctgatgctcggaaataccgagctgttttgccagaatggtacggtcactctgcgcctgcgaaagcagaatcataaaatccgtgttgtccagaatgttctcgatttcccggctggccaaaaggtctttgacgttctgcgtcaaagcagacggcacacatccttttttacgcagcattttccagaccgccacaaagtagctggctgtcagcggatcgcggagcaggatatgaaactcgtcaaagtagcaccaagtcgccgcaccctcgtggaagttctgatccaccgcctgcgaaacaaactcatttgtgatgtgcattgcaatctttctaaggttttcgcccatgtttttcagaacgatgcacaccacacggctgtccgtcttgacgttggtaggatggttaaagagattgagagagcctgtgcaataaagctctaaggcagttgccacgcgccgggcttcgggctccggctggcgtaagagctcctcatacaaatcctgcaacagcggtgtttttgcagtttccagtccgagcgcctgttcccggtacaccaaacgcacacagcggtcaatgaccgtcttttcaatgggctgcaagccttccttgccgccgaccaccagctcgcacagggataaaagaaaatccgccttcatggaaagcgggctttctccggcggccatattgagctccacatccatcggattgagatggtgcgggctgtccggggcaatctcgatcacctggccgcccagccttcgcaccagcggagcgtattcgcccatcgggtcaaccacaatgatccgatcctgcgggatggtgagaaacacattcaagagctcgcgctttgctgcaaagctcttgccggagcccgtagagcccaagtacatcccgtttgccgatttcaactttttgcggtcagccatgatgacattgtgggaaagtgcgttcatgccatagtagagggcctgcccagccatgcggagctcccttgtcataaaggggataaagatggcggtggagctggttgtcataccgcgctggatttctacctcgttgtagccaagagctaacgaggaaacaaagccctgttcctgttgccagtccagacggcgcagagcgcagttgtatttctgtgcgataccgcccacggtaaacacatcattttccaaccgctggcgggtaggcgcaaggtttaccaccgtaaaggtcagcagaaacattcgctcattgcgggactgcagatcggcaagaagctccgccgcgtccttgctgaatgtgatcaggtcagggggaagaatatccgggtcatagccggagcgcacagcctttctctgttcctccaccttcatttttccgatgtcagagattttccccttgatggtcttgattgccttgagctgatccacggtctgaatgtgcatggtcacggtcatttccgcatccagttccaagatttccgccagcagcttatccgaaagctctgatgccataatctgcaagtaggacaccgcaccccaatactggccgatgcggaatgtgcgggactggcggaagtcgagactgtccggggcaataaagtcttttgtgccaagcccggtctgcgggatgtctttccacgaaaagcggaacgcttcgcggctccccggatgcatctggctatgaagcagcgcaaggcgggcccgcccgtccataggctccgagggaacgcccagccgcttaaagttccccatgacatcggcctccacacgctccagacggggccgagcctccgcaatcccctcggcgggtatgccaaaggtgatgtactttgagcgttcaatgccgttattgcttttggcaatctgatttttcagcatcccggtaaactcatcccggacactgttatagttgtcatccgctttcgggatattgacctgatagcggctgcgggaatgggaacggcggttgataaaggaaagctggaacggcagcgagctgtcaaagtagttgagaaatgagctccatccgctgaatatggcggtctgatcctcggtggatgccacagagtaattgatgtcctcatattccacggtttttgtatagagcccgcccgggagtttgcacacaccgtccgggtgcatggacagatacgggatcgtctgctgggcagacagagccgcccggcctttacccttgacggctccgtttttcttctttgcgtttttcaatcacatcctcctttccagcgcccggcccggcaaagggcgcataaatgttttcggttcggtaggctctgatccccggcctgagaaacttggcccggatgatgttccgcacaaccttttcaaagggcaagccgtctttttcatacatggccagcaggaacgccggaagcataattcccagcatgagaaacatcgccccggtattgccgagggtgccacgggtcagcagataggccggaatccccaccgcgcccgcgctgccgaagcagacaagctggcgtttggtgaggttgaaagccatctttgttttgattttggataaatcgtttggtacgtttacatagggcatagatcacactcctttctgcacttcgggacaatgtgtcccaaagtccgggatggttggtgttacttcatttccccatacagcccagccgggcggggtctgcctggcaaagagctccacgcggggcagatctcccatcagggaaatgattttgtcgcgggcctcgtccggctttttgctgtgggcctcaatcggagaaatgatgaattgatgaatgttggcggcctgccgcttcgggtggcccttggttgccagcaggcagatttccgcgttgccccttgtccagaagccaaggccgtaaaaccagctatccgctttcttgttctttttcagccaaacgaaagcaacgcttttataggtgaagccccaagcctcgatcaaccggagcgcctccgggagctgcgggaaagtggcccataaaaagagtgcgctgtccggggctgcaagatcagccacaggcaacgcacataactcctcaatgctcatagtgggataatgattttccgccgcgccctgtactttcttagccgagtagcgccaagggggatcggcgtaaatgatagaatactgctggataattacactcctttctcgccagagctttttactgcctgcgccgcacggatacgctcactggcagcggcataaaaggccggggccgtttcaaagcatacaaagcggcgttctgtgttgatagctgcaatcgcggttgtgccggagcccgcgcaaatgtccgcgaccagttcgccggggtgggtataggtgcggatcagatactcgcagagctccacgggcttctgcgtggggtggatgccgccggacactgtaggcacaaaaagcacatttccgggatagcggcggccatcgttggactccgacccctgccgttcaaatttcccatagttggagcttgtaccgcttcgggaatgtacgcgggtatagggcttgccataagtaaactgaggattgtagaccggggacttctgataaaataccaagatattctcggactttttcagtggagcccggtttgcattgaggaagcccgttccgcgctccttgtaccaaacccactcatagcggagcatggcgaggttggatgcgcccagcaccttgtcaaaggggcactgtgcgaaaaacagcactgcgccattcggcttgaccgcccatttcaccgcctcccacagctccgggagcggcaggggcacatcccaataattccgggttgtgccgtagggcggatcagtcagcagcatatccacgctatgcttcggcagggagcgcaggccctcgatgccgtccatgagaaacaaaccctccttcgggacactttgtcccaaagtgcggctatcggtcattacgggcctcctttgccttggcaggcgcaggacgggcggcattttcttttccagcttgtttcgcggcttcggccatctgctccttgatcggggcaggccgtaccgcctgggcccgtgcaacaagctgttccaccgccgcatgatacgcctccacaccagccgcgttgatccgttcctgtgtggcgcggtcaggaatccgaaccgtagcccggtatcccgtccggctggcaggatcgggcttagagggagcgccgaggaaaatc
